(19) United States
(12) Patent Application Publication
(10) Pub. No.: US 2026/0139251 A1
(43) Pub. Date: May 21, 2026

(54) RNAi Agents for Inhibiting Expression of Mucin 5AC (MUC5AC), Compositions Thereof, and Methods of Use

(71) Applicant: Arrowhead Pharmaceuticals, Inc., Pasadena, CA (US)

(72) Inventors: Erik W. Bush, Verona, WI (US); Anthony Nicholas, Oregon, WI (US); Casi M. Schienebeck, Deerfield, WI (US)

(21) Appl. No.: 19/275,121

(22) Filed: Jul. 21, 2025

Related U.S. Application Data
(63) Continuation of application No. 17/824,841, filed on May 25, 2022, now Pat. No. 12,365,897.
(60) Provisional application No. 63/194,370, filed on May 28, 2021.

(51) Int. Cl. C12N 15/113; A61P 11/12

(52) U.S. Cl. CPC C12N 15/113; A61P 11/12; C12N 2310/14; C12N 2310/315; C12N 2310/317; C12N 2310/321

(57) ABSTRACT

Described are RNAi agents, compositions that include RNAi agents, and methods for inhibition of a Mucin 5AC (MUC5AC) gene. The MUC5AC RNAi agents and RNAi agent conjugates disclosed herein inhibit the expression of an MUC5AC gene. Pharmaceutical compositions that include one or more MUC5AC RNAi agents, optionally with one or more additional therapeutics, are also described. Delivery of the described MUC5AC RNAi agents to pulmonary epithelial cells, in vivo, provides for inhibition of MUC5AC gene expression and a reduction in MUC5AC production, which can provide a therapeutic benefit to subjects, including human subjects, for the treatment of various diseases including mucoobstructive lung disease such as severe asthma and various cancers.

### CROSS REFERENCE TO RELATED APPLICATIONS

[0001] This application is a continuation of U.S. patent application Ser. No. 17/824,841, filed on May 25, 2022, which claims priority from U.S. Provisional Patent Application Ser. No. 63/194,370, filed on May 28, 2021, the contents of which are incorporated herein by reference in its entirety.

### SEQUENCE LISTING

[0002] This application contains a Sequence Listing (in compliance with Standard ST26), which has been submitted in xml format and is hereby incorporated by reference in its entirety. The xml sequence listing file is named 30659-US2_SeqListing.xml, created Jun. 3, 2025, and is 6,411,920 bytes in size.

### FIELD OF THE INVENTION

[0003] The present disclosure relates to RNA interference (RNAi) agents, e.g., double stranded RNAi agents, for inhibition of Mucin 5AC (“MUC5AC”) gene expression, compositions that include MUC5AC RNAi agents, and methods of use thereof. BACKGROUND

[0004] MUC5AC is a transcriptionally regulated secreted mucin expressed in airway epithelia of the lung and in other mucosal tissues (for example, gastrointestinal, urogenital, eye, and ear) (Lillehoj et al, Int Rev Cell Mol Biol, 2013). In airways, MUC5AC and MUC5B are the major gel-forming mucins. MUC5B is constitutively expressed and is required for mucociliary clearance (Roy et al., Nature 2014). Normal subjects have a relatively higher expression of MUC5B versus MUC5AC in the trachea and proximal airways, with this ratio further increasing in distal airways with expression of MUC5AC almost undetectable in distal and terminal bronchioles (Okuda et al., AJRCCM 2019). Typically expressed at low levels in the airway, MUC5AC expression can be robustly induced by external stress stimuli like pro-inflammatory mediators (including, for example, type 2 cytokines: IL-4, IL-9, TL-17, TL-23 and IL-13), noxious inhaled substances (for example, cigarette smoke, acrolein, toxic gases), viral infections, and allergens. The resulting mucus hypersecretion and hyperconcentration is understood to be a common pathogenic mechanism linked to airway obstruction in severe asthma and other mucoobstructive lung diseases such as cystic fibrosis (CF), chronic obstructive pulmonary disease (COPD), non-CF bronchiectasis (NCFB), and primary ciliary dyskinesia (PCD) (Boucher, NEJM 2019). In asthma, COPD, and NCFB patients, exaggerated expression and secretion of MUC5AC results in a narrowing of airway lumen, airway obstruction, and exacerbations (Dunican et al., JCI 2017; Bonser et al., JCI 2016; Kesimer et al., NEJM 12017; Ramsey et al, AJRCCM 2019). A genome-wide association study (GWAS) identified a novel MUC5AC allele linked to increased MUC5AC expression and patients with moderate-to-severe asthma (Shrine et al., Lancet Respir Med 2019). Experimental evidence from MUC5AC-deficient mice demonstrated that MUC5AC-mediated airway plugging is a major contributor to airway hyperresponsiveness to allergens independent of inflammation and bronchoconstriction (Evans et al, Nat Commun, 2015). Current standard of care treatments for severe asthma and other mucoobstructive lung diseases include bronchodilators and anti-inflammatory therapeutics (such as corticosteroids and biologics), but currently available treatments do not directly address pathogenic mucin overexpression and hypersecretion. Alternative approaches that directly treat mucus hypersecretion and obstruction are needed.

[0005] Increased expression of MUC5AC has also been observed in malignancies such as lung adenocarcinomas, pancreatic cancer, salivary gland carcinoma, breast cancer, cholangiocarcinoma, ovarian cancer, and other tumors (Krishn et al., Carcinogenesis 2018), where it has been linked to migration and invasiveness of tumor cells. Loss-of-function mutations in MUC5AC and other mucin genes are significantly underrepresented in tumor cells, suggesting that mucin overexpression may shield tumors from recognition by immune cells (Gorlov et al., Cancer Genetics 2019). Tumor MUC5AC overexpression is associated with progression and poor survival in lung adenocarcinoma patients (Bauer et al., JCI Insight 2018). MUC5AC overexpression has also been linked to number of other conditions including: allergic rhinitis, chronic rhinosinusitis, otitis media. Barret's esophagus, pancreatitis, and inflammatory bowel disease (Krishn et al., Carcinogenesis 2018).

### SUMMARY

[0006] There exists a need for novel RNA interference (RNAi) agents (termed RNAi agents, RNAi triggers, or triggers), e.g., double stranded RNAi agents, that are able to selectively and efficiently inhibit the expression of a MUC5AC gene, including for use as a therapeutic or medicament. Further, there exists a need for compositions of novel MUC5AC-specific RNAi agents for the treatment of diseases or disorders associated with mucus hypersecretion and obstruction (referred to herein as “mucoobstructive” lung diseases and disorders) such as for example cystic fibrosis (CF), chronic obstructive pulmonary disease (COPD), non-CF bronchiectasis (NCFB), primary ciliary dyskinesia (PCD), and asthma, and/or diseases or disorders that can be mediated at least in part by a reduction in MUC5AC gene expression and/or MUC5AC protein levels.

[0007] The nucleotide sequences and chemical modifications of the MUC5AC RNAi agents disclosed herein, as well as their combination with certain specific targeting ligands suitable for selectively and efficiently delivering the MUC5AC RNAi agents in vivo, differ from what is known in the art. The MUC5AC RNAi agents disclosed herein provide for highly potent and efficient inhibition of the expression of a MUC5AC gene and have sequences suitable for use as a therapeutic for the treatment of diseases and disorders.

[0008] In general, the present disclosure features MUC5AC gene-specific RNAi agents, compositions that include MUC5AC RNAi agents, and methods for inhibiting expression of a MUC5AC gene in vitro and/or in vivo using the MUC5AC RNAi agents and compositions that include MUC5AC RNAi agents described herein. The MUC5AC RNAi agents described herein are able to selectively and efficiently decrease expression of a MUC5AC gene, and thereby reduce the expression of the MUC5AC protein, which can lead to a therapeutic benefit such as, for example, a reduction in mucoobstruction in the lung.

[0009] The described MUC5AC RNAi agents can be used in methods for therapeutic treatment (including preventative or prophylactic treatment) of symptoms and diseases including, but not limited to, mucoobstructive lung diseases (such as asthma, CF, COPD, NCFB, PCD), allergic bronchopulmonary aspergillosis, interstitial lung diseases, cancer (such as lung adenocarcinomas, pancreatic cancer, salivary gland carcinoma, breast cancer, cholangiocarcinoma, ovarian cancer, and other tumors), respiratory infections (such as respiratory syncytial virus, influenza, rhinovirus), otitis media, inflammatory bowel disease, gallstone disease, allergic rhinitis, chronic rhinosinusitis and nasal polyposis.

[0010] In one aspect, the disclosure features RNAi agents for inhibiting expression of a MUC5AC gene, wherein the RNAi agent includes a sense strand (also referred to as a passenger strand) and an antisense strand (also referred to as a guide strand). The sense strand and the antisense strand can be partially, substantially, or fully complementary to each other. The length of the RNAi agent sense strands described herein each can be 15 to 49 nucleotides in length. The length of the RNAi agent antisense strands described herein each can be 18 to 49 nucleotides in length. In some embodiments, the sense and antisense strands are independently 18 to 26 nucleotides in length. The sense and antisense strands can be either the same length or different lengths. In some embodiments, the sense and antisense strands are independently 21 to 26 nucleotides in length. In some embodiments, the sense and antisense strands are independently 21 to 24 nucleotides in length. In some embodiments, both the sense strand and the antisense strand are 21 nucleotides in length. In some embodiments, the antisense strands are independently 18, 19, 20, 21, 22, 23, 24, 25, 26, 27, 28, 29, or 30 nucleotides in length. In some embodiments, the sense strands are independently 15, 16, 17, 18, 19, 20, 21, 22, 23, 24, 25, 26, 27, 28, 29, 30, 31, 32, 33, 34, 35, 36, 37, 38, 39, 40, 41, 42, 43, 44, 45, 46, 47, 48, or 49 nucleotides in length. The RNAi agents described herein, upon delivery to a cell expressing MUC5AC, inhibit the expression of one or more MUC5AC gene variants in vivo and/or in vitro.

[0011] The MUC5AC RNAi agents disclosed herein target a human MUC5AC gene (see, e.g., SEQ ID NO:1). In some embodiments, the MUC5AC RNAi agents disclosed herein target a portion of a MUC5AC gene having the sequence of any of the sequences disclosed in Table 1.

[0012] In another aspect, the disclosure features compositions, including pharmaceutical compositions, that include one or more of the disclosed MUC5AC RNAi agents that are able to selectively and efficiently decrease expression of a MUC5AC gene. The compositions that include one or more MUC5AC RNAi agents described herein can be administered to a subject, such as a human or animal subject, for the treatment (including prophylactic treatment or inhibition) of symptoms and diseases associated with MUC5AC gene expression and/or MUC5AC protein levels.

[0013] Examples of MUC5AC RNAi agent sense strands and antisense strands that can be used in a MUC5AC RNAi agent are provided in Tables 3, 4, 5, 6, and 7. Examples of MUC5AC RNAi agent duplexes are provided in Tables 8A, 8B, 8C, 9, 10A, 10B, and 11. Examples of 19-nucleotide core stretch sequences that may consist of or may be included in the sense strands and antisense strands of certain MUC5AC RNAi agents disclosed herein, are provided in Table 2.

[0014] In another aspect, the disclosure features methods for delivering MUC5AC RNAi agents to epithelial cells in a subject, such as a mammal, in vivo. Also described herein are compositions for use in such methods. In some embodiments, disclosed herein are methods for delivering MUC5AC RNAi agents to pulmonary cells (epithelial cells, macrophages, smooth muscle, endothelial cells) to a subject in vivo. In some embodiments, the subject is a human subject.

[0015] The methods disclosed herein include the administration of one or more MUC5AC RNAi agents to a subject, e.g., a human or animal subject, by any suitable means known in the art. The pharmaceutical compositions disclosed herein that include one or more MUC5AC RNAi agents can be administered in a number of ways depending upon whether local or systemic treatment is desired. Administration can be, but is not limited to, for example, intravenous, intraarterial, subcutaneous, intraperitoneal, subdermal (e.g., via an implanted device), and intraparenchymal administration. In some embodiments, the pharmaceutical compositions described herein are administered by inhalation (such as dry powder inhalation or aerosol inhalation), intranasal administration, intratracheal administration, or oropharyngeal aspiration administration.

[0016] In some embodiments, it is desired that the MUC5AC RNAi agents described herein inhibit the expression of an MUC5AC gene in the pulmonary epithelium, for which the administration is by inhalation (e.g., by an inhaler device, such as a metered-dose inhaler, or a nebulizer such as a jet or vibrating mesh nebulizer, or a soft mist inhaler).

[0017] The one or more MUC5AC RNAi agents can be delivered to target cells or tissues using any oligonucleotide delivery technology known in the art. In some embodiments, a MUC5AC RNAi agent is delivered to cells or tissues by covalently linking the RNAi agent to a targeting group. In some embodiments, the targeting group can include a cell receptor ligand, such as an integrin targeting ligand. Integrins are a family of transmembrane receptors that facilitate cell-extracellular matrix (ECM) adhesion. In particular, integrin alpha-v-beta-6 (αvβ6) is an epithelial-specific integrin that is known to be a receptor for ECM proteins and the TGF-beta latency-associated peptide (LAP), and is expressed in various cells and tissues. Integrin αvβ6 is known to be highly upregulated in injured pulmonary epithelium. In some embodiments, the MUC5AC RNAi agents described herein are linked to an integrin targeting ligand that has affinity for integrin αvβ6. As referred to herein, an “αvβ6 integrin targeting ligand” is a compound that has affinity for integrin αvβ6, which can be utilized as a ligand to facilitate the targeting and delivery of an RNAi agent to which it is attached to the desired cells and/or tissues (i.e., to cells expressing integrin αvβ6). In some embodiments, multiple αvβ6 integrin targeting ligands or clusters of αvβ6 integrin targeting ligands are linked to a MUC5AC RNAi agent. In some embodiments, the MUC5AC RNAi agent-αvβ6 integrin targeting ligand conjugates are selectively internalized by lung epithelial cells, either through receptor-mediated endocytosis or by other means.

[0018] Examples of targeting groups useful for delivering MUC5AC RNAi agents that include αvβ6 integrin targeting ligands are disclosed, for example, in International Patent Application Publication No. WO 2018/085415 and International Patent Application Publication No. WO 2019/089765, the contents of each of which are incorporated by reference herein in their entirety.

[0019] A targeting group can be linked to the 3′ or 5′ end of a sense strand or an antisense strand of a MUC5AC RNAi agent. In some embodiments, a targeting group is linked to the 3′ or 5′ end of the sense strand. In some embodiments, a targeting group is linked to the 5′ end of the sense strand. In some embodiments, a targeting group is linked internally to a nucleotide on the sense strand and/or the antisense strand of the RNAi agent. In some embodiments, a targeting group is linked to the RNAi agent via a linker.

[0020] In another aspect, the disclosure features compositions that include one or more MUC5AC RNAi agents that have the duplex structures disclosed in Tables 8A, 8B, 8C, 9, 10A, 10B, and 11.

[0021] The use of MUC5AC RNAi agents provides methods for therapeutic (including prophylactic) treatment of diseases or disorders for which a reduction in MUC5AC gene expression and/or a reduction in MUC5AC protein levels can provide a therapeutic benefit. The MUC5AC RNAi agents disclosed herein can be used to treat various diseases, including mucoobstructive lung diseases (such as asthma, CF, COPD, NCFB, PCD), allergic bronchopulmonary aspergillosis, interstitial lung diseases, cancer (such as lung adenocarcinomas, pancreatic cancer, salivary gland carcinoma, breast cancer, cholangiocarcinoma, ovarian cancer, and other tumors), respiratory infections (such as respiratory syncytial virus, influenza, rhinovirus), otitis media, inflammatory bowel disease, gallstone disease, allergic rhinitis, chronic rhinosinusitis and nasal polyposis. In some embodiments, the MUC5AC RNAi agents disclosed herein can be used to treat a mucoobstructive lung disease, such as severe asthma or COPD. MUC5AC RNAi agents can further be used to treat, for example, various cancers. Such methods of treatment include administration of a MUC5AC RNAi agent to a human being or animal having elevated or enhanced MUC5AC gene expression and/or MUC5AC protein levels above what is desired.

[0022] One aspect described herein is an RNAi agent for inhibiting expression of a MUC5AC gene, comprising:
[0023] (i) an antisense strand that is between 18 and 49 nucleotides in length that includes a nucleotide sequence at least partially complementary to a corresponding stretch of contiguous nucleotides of the MUC5AC gene transcript (SEQ ID NO: 1); and
[0024] (ii) a sense strand comprising a nucleotide sequence that is at least partially complementary to the antisense strand;
   wherein the RNAi agent sense strand is optionally further linked to a targeting ligand, and wherein RNAi agent is capable of inhibiting expression of a MUC5AC gene.

[0025] Another aspect described herein is an RNAi agent for inhibiting expression of a MUC5AC gene, comprising:
[0026] (i) an antisense strand comprising at least 17 contiguous nucleotides differing by 0 or 1 nucleotides from any one of the sequences provided in Table 3; and
[0027] (ii) a sense strand comprising a nucleotide sequence that is at least partially complementary to the antisense strand;
   wherein the RNAi agent sense strand is optionally further linked to a targeting ligand, and wherein RNAi agent is capable of inhibiting expression of a MUC5AC gene.

[0028] In some embodiments, a MUC5AC RNAi agent disclosed herein includes an antisense strand that consists of, consists essentially of, or comprises a sequence differing by 0 or 1 nucleobases from the nucleotide sequence (5′→3′) UUGUAGUAGUCGCAGAACAGC (SEQ ID NO: 1525). In some embodiments, a MUC5AC RNAi agent disclosed herein includes an antisense strand that consists of, consists essentially of, or comprises a nucleotide sequence differing by no more than 1 nucleotide from the nucleotide sequence (5′→3′) UUGUAGUAGUCGCAGAACAGC (SEQ ID NO: 1525), wherein all or substantially all of the nucleotides are modified nucleotides. In some embodiments, a MUC5AC RNAi agent disclosed herein includes an antisense strand that consists of, consists essentially of, or comprises a nucleobase sequence differing by 0 or 1 nucleobases from the nucleotide sequence (5′→3′) UUGUAGUAGUCGCAGAACAGC (SEQ ID NO: 1525), wherein SEQ ID NO: 1525 is located at positions 1-21 (5′→3′) of the antisense strand.

[0029] In some embodiments, a MUC5AC RNAi agent disclosed herein includes an antisense strand that consists of, consists essentially of, or comprises a modified nucleotide sequence differing by no more than 1 nucleotide from the nucleotide sequence (5′→3′) cPrpusUfsgsUfaGfuAfgUfcGfcAfgAfaCfaGfsc (SEQ ID NO: 1127), wherein a, c, g, and u represent 2′-O-methyl adenosine, cytidine, guanosine, and uridine, respectively; Af, Cf, Gf, and Uf represent 2′-fluoro adenosine, cytidine, guanosine, and uridine, respectively; cPrpu represents a 5′-cyclopropyl phosphonate-2′-O-methyluridine; and s represents a phosphorothioate linkage, and wherein the sense strand is at least substantially complementary to the antisense strand. As the person of ordinary skill in the art would clearly understand, the inclusion of a phosphorothioate linkage as shown in the modified nucleotide sequences disclosed herein replaces the phosphodiester linkage typically present in oligonucleotides (see, e.g., FIGS. 3A through 3J showing all internucleoside linkages). In some embodiments, a MUC5AC RNAi agent disclosed herein includes an antisense strand that consists of, consists essentially of, or comprises the nucleotide sequence (5′→3′) cPrpusUfsgsUfaGfuAfgUfcGfcAfgAfaCfaGfsc (SEQ ID NO: 1127), wherein a, c, g, and u represent 2′-O-methyl adenosine, cytidine, guanosine, and uridine, respectively; Af, Cf, Gf, and Uf represent 2′-fluoro adenosine, cytidine, guanosine, and uridine, respectively; cPrpu represents a 5′-cyclopropyl phosphonate-2′-O-methyluridine; and s represents a phosphorothioate linkage, and wherein the sense strand is at least substantially complementary to the antisense strand.

[0030] In some embodiments, a MUC5AC RNAi agent disclosed herein includes an antisense strand that consists of, consists essentially of, or comprises a modified nucleotide sequence differing by no more than 1 nucleotide from the nucleotide sequence (5′→3′) usUfsgsUfaGfuAfgUfcGfcAfgAfaCfaGfsc (SEQ ID NO: 1065), wherein a, c, g, and u represent 2′-O-methyl adenosine, cytidine, guanosine, and uridine, respectively; Af, Cf, Gf, and Uf represent 2′-fluoro adenosine, cytidine, guanosine, and uridine, respectively; and s represents a phosphorothioate linkage, and wherein the sense strand is at least substantially complementary to the antisense strand. In some embodiments, a MUC5AC RNAi agent disclosed herein includes an antisense strand that consists of, consists essentially of, or comprises the nucleotide sequence (5′→3′) usUfsgsUfaGfuAfgUfcGfcAfgAfaCfaGfsc (SEQ ID NO: 1065), wherein a, c, g, and u represent 2′-O-methyl adenosine, cytidine, guanosine, and uridine, respectively; Af, Cf, Gf, and Uf represent 2′-fluoro adenosine, cytidine, guanosine, and uridine, respectively; and s represents a phosphorothioate linkage, and wherein the sense strand is at least substantially complementary to the antisense strand.

[0031] In some embodiments, a MUC5AC RNAi agent disclosed herein includes an antisense strand that consists of, consists essentially of, or comprises a nucleobase sequence differing by 0 or 1 nucleobases from the nucleotide sequence (5′→3′) UUCUUGUUCAGGCAAAUCAGC (SEQ ID NO: 1535). In some embodiments, a MUC5AC RNAi agent disclosed herein includes an antisense strand that consists of, consists essentially of, or comprises a nucleotide sequence differing by no more than 1 nucleotide from the nucleotide sequence (5′→3′) UUCUUGUUCAGGCAAAUCAGC (SEQ ID NO: 1535), wherein all or substantially all of the nucleotides are modified nucleotides. In some embodiments, a MUC5AC RNAi agent disclosed herein includes an antisense strand that consists of, consists essentially of, or comprises a nucleobase sequence differing by 0 or 1 nucleobases from the nucleotide sequence (5′→3′) UUCUUGUUCAGGCAAAUCAGC (SEQ ID NO: 1535), wherein SEQ ID NO: 1535 is located at positions 1-21 (5′→3′) of the antisense strand.

[0032] In some embodiments, a MUC5AC RNAi agent disclosed herein includes an antisense strand that consists of, consists essentially of, or comprises a modified nucleotide sequence differing by no more than 1 nucleotide from the nucleotide sequence (5′→3′) usUfscsuuguucagGfcAfaAfucagsc (SEQ ID NO: 1166), wherein a, c, g, and u represent 2′-O-methyl adenosine, cytidine, guanosine, and uridine, respectively; Af, Cf, Gf, and Uf represent 2′-fluoro adenosine, cytidine, guanosine, and uridine, respectively; and s represents a phosphorothioate linkage, and wherein the sense strand is at least substantially complementary to the antisense strand. As the person of ordinary skill in the art would clearly understand, the inclusion of a phosphorothioate linkage as shown in the modified nucleotide sequences disclosed herein replaces the phosphodiester linkage typically present in oligonucleotides (see, e.g., FIGS. 3A through 3J showing all internucleoside linkages). In some embodiments, a MUC5AC RNAi agent disclosed herein includes an antisense strand that consists of, consists essentially of, or comprises the nucleotide sequence (5′→3′) usUfscsuuguucagGfcAfaAfucagsc (SEQ ID NO: 1166), wherein a, c, g, and u represent 2′-O-methyl adenosine, cytidine, guanosine, and uridine, respectively; Af, Cf, Gf, and Uf represent 2′-fluoro adenosine, cytidine, guanosine, and uridine, respectively; and s represents a phosphorothioate linkage, and wherein the sense strand is at least substantially complementary to the antisense strand.

[0033] In some embodiments, a MUC5AC RNAi agent disclosed herein includes an antisense strand that consists of, consists essentially of, or comprises a modified nucleotide sequence differing by no more than 1 nucleotide from the nucleotide sequence (5′→3′) cPrpuUfcuuguucagGfcAfaAfucagsc (SEQ ID NO: 1191), wherein a, c, g, and u represent 2′-O-methyl adenosine, cytidine, guanosine, and uridine, respectively; Af, Cf, Gf, and Uf represent 2′-fluoro adenosine, cytidine, guanosine, and uridine, respectively; cPrpu represents a 5′-cyclopropyl phosphonate-2′-O-methyluridine; and s represents a phosphorothioate linkage, and wherein the sense strand is at least substantially complementary to the antisense strand. As the person of ordinary skill in the art would clearly understand, the inclusion of a phosphorothioate linkage as shown in the modified nucleotide sequences disclosed herein replaces the phosphodiester linkage typically present in oligonucleotides (see, e.g., FIGS. 3A through 3J showing all internucleoside linkages). In some embodiments, a MUC5AC RNAi agent disclosed herein includes an antisense strand that consists of, consists essentially of, or comprises the nucleotide sequence (5′→3′) cPrpuUfcuuguucagGfcAfaAfucagsc (SEQ ID NO: 1191), wherein a, c, g, and u represent 2′-O-methyl adenosine, cytidine, guanosine, and uridine, respectively; Af, Cf, Gf, and Uf represent 2′-fluoro adenosine, cytidine, guanosine, and uridine, respectively; cPrpu represents a 5′-cyclopropyl phosphonate-2′-O-methyluridine; and s represents a phosphorothioate linkage, and wherein the sense strand is at least substantially complementary to the antisense strand.

[0034] In some embodiments, a MUC5AC RNAi agent disclosed herein includes an antisense strand that consists of, consists essentially of, or comprises a nucleotide sequence that differs by 0 or 1 nucleotides from one of the following nucleotide sequences (5′→3′):

(SEQ ID NO: 1525)
UUGUAGUAGUCGCAGAACAGC;
or
(SEQ ID NO: 1535)
UUCUUGUUCAGGCAAAUCAGC;

wherein the MUC5AC RNAi agent further includes a sense strand that is at least partially complementary to the antisense strand; and wherein all or substantially all of the nucleotides on both the antisense strand and the sense strand are modified nucleotides.

[0035] In some embodiments, a MUC5AC RNAi agent disclosed herein includes an antisense strand that consists of, consists essentially of, or comprises a nucleotide sequence that differs by 0 or 1 nucleotides from one of the following nucleotide sequences (5′→3′):

(SEQ ID NO: 1525)
UUGUAGUAGUCGCAGAACAGC;
or
(SEQ ID NO: 1535)
UUCUUGUUCAGGCAAAUCAGC;

wherein the MUC5AC RNAi agent further includes a sense strand that is at least partially complementary to the antisense strand; wherein all or substantially all of the nucleotides on both the antisense strand and the sense strand are modified nucleotides; and wherein the sense strand further includes inverted abasic residues at the 3′ terminal end and at the 5′ end of the nucleotide sequence, and the sense strand also includes a targeting ligand that is covalently linked to the 5′ terminal end, wherein the targeting ligand includes a compound having affinity for an integrin receptor.

[0036] In some embodiments, a MUC5AC RNAi agent disclosed herein includes an antisense strand that consists of, consists essentially of, or comprises a nucleotide sequence that differs by 0 or 1 nucleotides from one of the following nucleotide sequences (5′→3′):

(SEQ ID NO: 1525)
UUGUAGUAGUCGCAGAACAGC;
or
(SEQ ID NO: 1535)
UUCUUGUUCAGGCAAAUCAGC;

wherein the MUC5AC RNAi agent further includes a sense strand that is at least partially complementary to the antisense strand; wherein all or substantially all of the nucleotides on both the antisense strand and the sense strand are modified nucleotides; and wherein the sense strand further includes inverted abasic residues at the 3′ terminal end and at the 5′ end of the nucleotide sequence, and the sense strand also includes a targeting ligand that is covalently linked to the 5′ terminal end, wherein the targeting ligand includes a compound having affinity for an integrin receptor; and wherein the respective antisense strand sequence is located at positions 1-21 of the antisense strand.

[0037] In some embodiments, a MUC5AC RNAi agent disclosed herein includes an antisense strand and a sense strand, wherein the antisense strand and the sense strand consist of, consist essentially of, or comprise nucleotide sequences that differ by 0 or 1 nucleotides from one of the following nucleotide sequence (5′→3′) pairs:

(SEQ ID NO: 1525)
UUGUAGUAGUCGCAGAACAGC
and
(SEQ ID NO: 1617)
GCUGUUCUGCGACUACUACAA;
or
(SEQ ID NO: 1535)
UUCUUGUUCAGGCAAAUCAGC
and
(SEQ ID NO: 1632)
GCUGAUUUGCCUGAACAAGAA;

or wherein all or substantially all of the nucleotides on both the antisense strand and the sense strand are modified nucleotides.

[0038] In some embodiments, a MUC5AC RNAi agent disclosed herein includes an antisense strand and a sense strand, wherein the antisense strand and the sense strand consist of, consist essentially of, or comprise nucleotide sequences that differ by 0 or 1 nucleotides from one of the following nucleotide sequences (5′→3′) pairs:

(SEQ ID NO: 1525)
UUGUAGUAGUCGCAGAACAGC
and
(SEQ ID NO: 1617)
GCUGUUCUGCGACUACUACAA;
or
(SEQ ID NO: 1535)
UUCUUGUUCAGGCAAAUCAGC
and
(SEQ ID NO: 1632)
GCUGAUUUGCCUGAACAAGAA;

or wherein all or substantially all of the nucleotides on both the antisense strand and the sense strand are modified nucleotides; and wherein the sense strand further includes inverted abasic residues at the 3′ terminal end and at the 5′ end of the nucleotide sequence, and the sense strand also includes a targeting ligand that is covalently linked to the 5′ terminal end, wherein the targeting ligand includes a compound with affinity for an integrin receptor.

[0039] In some embodiments, a MUC5AC RNAi agent disclosed herein includes an antisense strand that consists of, consists essentially of, or comprises a modified nucleotide sequence that differs by 0 or 1 nucleotides from one of the following nucleotide sequences (5′→3′):

(SEQ ID NO: 1127)
cPrpusUfsgsUfaGfuAfgUfcGfcAfgAfaCfaGfsc;
(SEQ ID NO: 1065)
usUfsgsUfaGfuAfgUfcGfcAfgAfaCfaGfsc;
(SEQ ID NO: 1166)
usUfscsuuguucagGfcAfaAfucagsc;
(SEQ ID NO: 1191)
cPrpuUfcuuguucagGfcAfaAfucagsc;

wherein a, c, g, and u represent 2′-O-methyl adenosine, cytidine, guanosine, and uridine, respectively; Af, Cf, Gf, and Uf represent 2′-fluoro adenosine, cytidine, guanosine, and uridine, respectively; cPrpu represents a 5′-cyclopropyl phosphonate-2′-O-methyluridine; s represents a phosphorothioate linkage; and wherein the MUC5AC RNAi agent further includes the sense strand that is at least partially complementary to the antisense strand; and wherein all or substantially all of the nucleotides of the sense strand are modified nucleotides.

[0040] In some embodiments, a MUC5AC RNAi agent disclosed herein includes an antisense strand that consists of, consists essentially of, or comprises a modified nucleotide sequence that differs by 0 or 1 nucleotides from one of the following nucleotide sequences (5′→3′):

(SEQ ID NO: 1127)
cPrpusUfsgsUfaGfuAfgUfcGfcAfgAfaCfaGfsc;
(SEQ ID NO: 1065)
usUfsgsUfaGfuAfgUfcGfcAfgAfaCfaGfsc;
(SEQ ID NO: 1166)
usUfscsuuguucagGfcAfaAfucagsc;
(SEQ ID NO: 1191)
cPrpuUfcuuguucagGfcAfaAfucagsc;

wherein the MUC5AC RNAi agent further includes the sense strand that is at least partially complementary to the antisense strand; wherein all or substantially all of the nucleotides of the sense strand are modified nucleotides; wherein all or substantially all of the nucleotides on both the antisense strand and the sense strand are modified nucleotides; and wherein the sense strand further includes inverted abasic residues at the 3′ terminal end and at the 5′ end of the nucleotide sequence, and the sense strand also includes a targeting ligand that is covalently linked to the 5′ terminal end, wherein the targeting ligand includes a compound with affinity for an integrin receptor.

[0041] In some embodiments, a MUC5AC RNAi agent disclosed herein includes an antisense strand and a sense strand that consists of, consists essentially of, or comprises one of the following nucleotide sequence pairs (5′→3′):

(SEQ ID NO: 1127)
cPrpusUfsgsUfaGfuAfgUfcGfcAfgAfaCfaGfsc
and
(SEQ ID NO: 1265)
gscuguucuGfCfGfacuacuacaa;
(SEQ ID NO: 1065)
usUfsgsUfaGfuAfgUfcGfcAfgAfaCfaGfsc
and
(SEQ ID NO: 1265)
gscuguucuGfCfGfacuacuacaa;
(SEQ ID NO: 1166)
usUfscsuuguucagGfcAfaAfucagsc
and
(SEQ ID NO: 1315)
gscugauUfuGfcCfugaacaagaa;
and
(SEQ ID NO: 1191)
cPrpuUfcuuguucagGfcAfaAfucagsc
and
(SEQ ID NO: 1315)
gscugauUfuGfcCfugaacaagaa;

wherein a, c, g, and u represent 2′-O-methyl adenosine, cytidine, guanosine, and uridine, respectively; Af, Cf, Gf, and Uf represent 2′-fluoro adenosine, cytidine, guanosine, and uridine, respectively; cPrpu represents a 5′-cyclopropyl phosphonate-2′-O-methyluridine; and s represents a phosphorothioate linkage; and wherein the sense strand also includes a targeting ligand having affinity for an integrin receptor, wherein the targeting ligand is optionally linked at the 5′-end of the sense strand.

[0042] In some embodiments, a MUC5AC RNAi agent disclosed herein includes an antisense strand and a sense strand that consists of, consists essentially of, or comprises modified nucleotide sequences that differs by 0 or 1 nucleotides from one of the following sequence pairs (5′→3′):

(SEQ ID NO: 1127)
cPrpusUfsgsUfaGfuAfgUfcGfcAfgAfaCfaGfsc
and
(SEQ ID NO: 1491)
Tri-SM6.1-avb6-(TA14)gscuguucuGfCfGfacuacua
caas(invAb);
(SEQ ID NO: 1065)
usUfsgsUfaGfuAfgUfcGfcAfgAfaCfaGfsc
and
(SEQ ID NO: 1491)
Tri-SM6.1-avb6-(TA14)gscuguucuGfCfGfacuacua
caas(invAb);
(SEQ ID NO: 1166)
usUfscsuuguucagGfcAfaAfucagsc
and
(SEQ ID NO: 1513)
Tri-SM6.1-avb6-(TA14)gscugauUfuGfcCfugaacaa
gaas(invAb);
(SEQ ID NO: 1191)
cPrpuUfcuuguucagGfcAfaAfucagsc
and
(SEQ ID NO: 1513)
Tri-SM6.1-avb6-(TA14)gscugauUfuGfcCfugaacaa
gaas(invAb);

wherein a, c, g, and u represent 2′-O-methyl adenosine, cytidine, guanosine, and uridine, respectively; Af, Cf, Gf, and Uf represent 2′-fluoro adenosine, cytidine, guanosine, and uridine, respectively; cPrpu represents a 5′-cyclopropyl phosphonate-2′-O-methyluridine; Tri-SM6.1-αvβ6-(TA14) represents the tridentate αvβ6 epithelial cell targeting ligand with the chemical structure as shown in FIG. 1; (invAb) represents an inverted abasic deoxyribonucleotide (see also Table 11), and s represents a phosphorothioate linkage.

[0043] In some embodiments, a MUC5AC RNAi agent disclosed herein includes an antisense strand that includes a nucleobase sequence that differs by 0 or 1 nucleobases from the nucleotide sequences selected from the group consisting of 5′→3′):

(SEQ ID NO: 79)
UUGUAGUAGUCGCAGAACA;
and
(SEQ ID NO: 83)
UUCUUGUUCAGGCAAAUCA.

[0044] In some embodiments, a MUC5AC RNAi agent disclosed herein includes an antisense strand that includes a nucleobase sequence that differs by 0 or 1 nucleobases from the nucleotide sequences selected from the group consisting of (5′→3′):

(SEQ ID NO: 79)
UUGUAGUAGUCGCAGAACA;
and
(SEQ ID NO: 83)
UUCUUGUUCAGGCAAAUCA;

wherein all or substantially all of the nucleotides are modified nucleotides.

[0045] In some embodiments, a MUC5AC RNAi agent disclosed herein includes an antisense strand that includes a nucleobase sequence that differs by 0 or 1 nucleobases from the nucleotide sequences selected from the group consisting of (5′→3′):

(SEQ ID NO: 79)
UUGUAGUAGUCGCAGAACA;
and
(SEQ ID NO: 83)
UUCUUGUUCAGGCAAAUCA;

wherein all or substantially all of the nucleotides are modified nucleotides, and wherein SEQ ID NO:79 and SEQ ID NO: 83, respectively, is located at nucleotide positions 1-19 (5′→3′) of the antisense strand.

[0046] In some embodiments, a MUC5AC RNAi agent disclosed herein includes an antisense strand and a sense strand that each include a nucleobase sequences that differs by 0 or 1 nucleobases from the nucleotide sequence pairs selected from the group consisting of (5′→3′):

(SEQ ID NO: 79)
UUGUAGUAGUCGCAGAACA;
and
(SEQ ID NO: 568)
UGUUCUGCGACUACUACAA;
or
(SEQ ID NO: 83)
UUCUUGUUCAGGCAAAUCA
and
(SEQ ID NO: 572)
UGAUUUGCCUGAACAAGAA.

[0047] In some embodiments, a MUC5AC RNAi agent disclosed herein includes an antisense strand and a sense strand that each include a nucleobase sequences that differs by 0 or 1 nucleobases from the nucleotide sequence pairs selected from the group consisting of (5′→3′):

(SEQ ID NO: 79)
UUGUAGUAGUCGCAGAACA;
and
(SEQ ID NO: 568)
UGUUCUGCGACUACUACAA;
or
(SEQ ID NO: 83)
UUCUUGUUCAGGCAAAUCA
and
(SEQ ID NO: 572)
UGAUUUGCCUGAACAAGAA;

and
wherein all or substantially all of the nucleotides are modified nucleotides.

### Definitions

[0048] As used herein, the terms “oligonucleotide” and “polynucleotide” mean a polymer of linked nucleosides each of which can be independently modified or unmodified.

[0049] As used herein, an “RNAi agent” (also referred to as an “RNAi trigger”) means a composition that contains an RNA or RNA-like (e.g., chemically modified RNA) oligonucleotide molecule that is capable of degrading or inhibiting (e.g., degrades or inhibits under appropriate conditions) translation of targeted messenger RNA (mRNA) transcripts in a sequence specific manner. As used herein, RNAi agents may operate through the RNA interference mechanism (i.e., inducing RNA interference through interaction with the RNA interference pathway machinery (RNA-induced silencing complex or RISC) of mammalian cells), or by any alternative mechanism(s) or pathway(s). While it is believed that RNAi agents, as that term is used herein, operate primarily through the RNA interference mechanism, the disclosed RNAi agents are not bound by or limited to any particular pathway or mechanism of action. RNAi agents disclosed herein are comprised of a sense strand and an antisense strand, and include, but are not limited to: small (or short) interfering RNAs (siRNAs), double stranded RNAs (dsRNA), micro RNAs (miRNAs), short hairpin RNAs (shRNA), and dicer substrates. The antisense strand of the RNAi agents described herein is at least partially complementary to the mRNA being targeted (i.e., MUC5AC mRNA). RNAi agents can include one or more modified nucleotides and/or one or more non-phosphodiester linkages.

[0050] As used herein, the terms “silence,” “reduce,” “inhibit,” “down-regulate,” or “knockdown” when referring to expression of a given gene, mean that the expression of the gene, as measured by the level of RNA transcribed from the gene or the level of polypeptide, protein, or protein subunit translated from the mRNA in a cell, group of cells, tissue, organ, or subject in which the gene is transcribed, is reduced when the cell, group of cells, tissue, organ, or subject is treated with the RNAi agents described herein as compared to a second cell, group of cells, tissue, organ, or subject that has not or have not been so treated.

[0051] As used herein, the terms “sequence” and “nucleotide sequence” mean a succession or order of nucleobases or nucleotides, described with a succession of letters using standard nomenclature. Unless otherwise indicated, nucleotide sequences are written left to right in 5′ to 3′ orientation.

[0052] As used herein, a “base,” “nucleotide base,” or “nucleobase,” is a heterocyclic pyrimidine or purine compound that is a component of a nucleotide, and includes the primary purine bases adenine and guanine, and the primary pyrimidine bases cytosine, thymine, and uracil. A nucleobase may further be modified to include, without limitation, universal bases, hydrophobic bases, promiscuous bases, size-expanded bases, and fluorinated bases. (See, e.g., Modified Nucleosides in Biochemistry, Biotechnology and Medicine, Herdewijn, P. ed. Wiley-VCH, 2008). The synthesis of such modified nucleobases (including phosphoramidite compounds that include modified nucleobases) is known in the art.

[0053] As used herein, the term “nucleotide” has the same meaning as commonly understood in the art. Thus, the term “nucleotide” as used herein, refers to a glycoside comprising a sugar moiety, a base moiety and a covalently linked group (linkage group), such as a phosphate or phosphorothioate internucleoside linkage group, and covers both naturally occurring nucleotides, such as DNA or RNA, and non-naturally occurring nucleotides comprising modified sugar and/or base moieties, which are also referred to as nucleotide analogs or modified nucleotides herein. A single nucleotide may be referred to here as a monomer or unit.

[0054] As used herein, and unless otherwise indicated, the term “complementary,” when used to describe a first nucleobase or nucleotide sequence (e.g., RNAi agent sense strand or targeted mRNA) in relation to a second nucleobase or nucleotide sequence (e.g., RNAi agent antisense strand or a single-stranded antisense oligonucleotide), means the ability of an oligonucleotide or polynucleotide including the first nucleotide sequence to hybridize (form base pair hydrogen bonds under mammalian physiological conditions (or otherwise suitable in vivo or in vitro conditions)) and form a duplex or double helical structure under certain standard conditions with an oligonucleotide that includes the second nucleotide sequence. The person of ordinary skill in the art would be able to select the set of conditions most appropriate for a hybridization test. Complementary sequences include Watson-Crick base pairs or non-Watson-Crick base pairs and include natural or modified nucleotides or nucleotide mimics, at least to the extent that the above hybridization requirements are fulfilled. Sequence identity or complementarity is independent of modification. For example, a and Af, as defined herein, are complementary to U (or T) and identical to A for the purposes of determining identity or complementarity.

[0055] As used herein, “perfectly complementary” or “fully complementary” means that in a hybridized pair of nucleobase or nucleotide sequence molecules, all (100%) of the bases in a contiguous sequence of a first oligonucleotide will hybridize with the same number of bases in a contiguous sequence of a second oligonucleotide. The contiguous sequence may comprise all or a part of a first or second nucleotide sequence.

[0056] As used herein, “partially complementary” means that in a hybridized pair of nucleobase or nucleotide sequence molecules, at least 70%, but not all, of the bases in a contiguous sequence of a first oligonucleotide will hybridize with the same number of bases in a contiguous sequence of a second oligonucleotide. The contiguous sequence may comprise all or a part of a first or second nucleotide sequence.

[0057] As used herein, “substantially complementary” means that in a hybridized pair of nucleobase or nucleotide sequence molecules, at least 85%, but not all, of the bases in a contiguous sequence of a first oligonucleotide will hybridize with the same number of bases in a contiguous sequence of a second oligonucleotide. The contiguous sequence may comprise all or a part of a first or second nucleotide sequence.

[0058] As used herein, the terms “complementary,” “fully complementary,” “partially complementary,” and “substantially complementary” are used with respect to the nucleobase or nucleotide matching between the sense strand and the antisense strand of an RNAi agent, or between the antisense strand of an RNAi agent and a sequence of an MUC5AC mRNA.

[0059] As used herein, the term “substantially identical” or “substantial identity,” as applied to a nucleic acid sequence means the nucleotide sequence (or a portion of a nucleotide sequence) has at least about 85% sequence identity or more, e.g., at least 90%, at least 95%, or at least 99% identity, compared to a reference sequence. Percentage of sequence identity is determined by comparing two optimally aligned sequences over a comparison window. The percentage is calculated by determining the number of positions at which the same type of nucleic acid base occurs in both sequences to yield the number of matched positions, dividing the number of matched positions by the total number of positions in the window of comparison and multiplying the result by 100 to yield the percentage of sequence identity. The inventions disclosed herein encompass nucleotide sequences substantially identical to those disclosed herein.

[0060] As used herein, the terms “treat,” “treatment,” and the like, mean the methods or steps taken to provide relief from or alleviation of the number, severity, and/or frequency of one or more symptoms of a disease in a subject. As used herein, “treat” and “treatment” may include the prevention, management, prophylactic treatment, and/or inhibition or reduction of the number, severity, and/or frequency of one or more symptoms of a disease in a subject.

[0061] As used herein, the phrase “introducing into a cell,” when referring to an RNAi agent, means functionally delivering the RNAi agent into a cell. The phrase “functional delivery,” means delivering the RNAi agent to the cell in a manner that enables the RNAi agent to have the expected biological activity, e.g., sequence-specific inhibition of gene expression.

[0062] Unless stated otherwise, use of the symbol [symbol] as used herein means that any group or groups may be linked thereto that is in accordance with the scope of the inventions described herein.

[0063] As used herein, the term “isomers” refers to compounds that have identical molecular formulae, but that differ in the nature or the sequence of bonding of their atoms or in the arrangement of their atoms in space. Isomers that differ in the arrangement of their atoms in space are termed “stereoisomers.” Stereoisomers that are not mirror images of one another are termed “diastereoisomers,” and stereoisomers that are non-superimposable mirror images are termed “enantiomers,” or sometimes optical isomers. A carbon atom bonded to four non-identical substituents is termed a “chiral center.”

[0064] As used herein, unless specifically identified in a structure as having a particular conformation, for each structure in which asymmetric centers are present and thus give rise to enantiomers, diastereomers, or other stereoisomeric configurations, each structure disclosed herein is intended to represent all such possible isomers, including their optically pure and racemic forms. For example, the structures disclosed herein are intended to cover mixtures of diastereomers as well as single stereoisomers.

[0065] As used in a claim herein, the phrase “consisting of” excludes any element, step, or ingredient not specified in the claim. When used in a claim herein, the phrase “consisting essentially of” limits the scope of a claim to the specified materials or steps and those that do not materially affect the basic and novel characteristic(s) of the claimed invention.

[0066] The person of ordinary skill in the art would readily understand and appreciate that the compounds and compositions disclosed herein may have certain atoms (e.g., N, O, or S atoms) in a protonated or deprotonated state, depending upon the environment in which the compound or composition is placed. Accordingly, as used herein, the structures disclosed herein envisage that certain functional groups, such as, for example, OH, SH, or NH, may be protonated or deprotonated. The disclosure herein is intended to cover the disclosed compounds and compositions regardless of their state of protonation based on the environment (such as pH), as would be readily understood by the person of ordinary skill in the art. Correspondingly, compounds described herein with labile protons or basic atoms should also be understood to represent salt forms of the corresponding compound. Compounds described herein may be in a free acid, free base, or salt form. Pharmaceutically acceptable salts of the compounds described herein should be understood to be within the scope of the invention.

[0067] As used herein, the term “linked” or “conjugated” when referring to the connection between two compounds or molecules means that two compounds or molecules are joined by a covalent bond. Unless stated, the terms “linked” and “conjugated” as used herein may refer to the connection between a first compound and a second compound either with or without any intervening atoms or groups of atoms.

[0068] As used herein, the term “including” is used to herein mean, and is used interchangeably with, the phrase “including but not limited to.” The term “or” is used herein to mean, and is used interchangeably with, the term “and/or,” unless the context clearly indicates otherwise.

[0069] Unless otherwise defined, all technical and scientific terms used herein have the same meaning as commonly understood by one of ordinary skill in the art. Although methods and materials similar or equivalent to those described herein can be used in the practice or testing of the present invention, suitable methods and materials are described below. All publications, patent applications, patents, and other references mentioned herein are incorporated by reference in their entirety. In case of conflict, the present specification, including definitions, will control. In addition, the materials, methods, and examples are illustrative only and not intended to be limiting.

[0070] Where a value is explicitly recited, it is to be understood that values which are about the same quantity or amount as the recited value are also within the scope of the disclosure. Where a combination is disclosed, each sub-combination of the elements of that combination is also specifically disclosed and is within the scope of the disclosure. Conversely, where different elements or groups of elements are individually disclosed, combinations thereof are also disclosed. Where any element of a disclosure is disclosed as having a plurality of alternatives, examples of that disclosure in which each alternative is excluded singly or in any combination with the other alternatives are also hereby disclosed; more than one element of a disclosure can have such exclusions, and all combinations of elements having such exclusions are hereby disclosed.

[0071] Other objects, features, aspects, and advantages of the invention will be apparent from the following detailed description, accompanying figures, and from the claims.

### BRIEF DESCRIPTION OF THE DRAWINGS

[0072] FIG. 1. Chemical structure representation of the tridentate αvβ6 epithelial cell targeting ligand referred to herein as Tri-SM6.1-αvβ6-(TA14).

[0073] FIG. 2. Chemical structure representation of the peptide αvβ6 epithelial cell targeting ligand referred to herein as αvβ6-pep1.

The following abbreviations are used in FIGS. 3A to 3J: a, c, g, i, and u are 2′-O-methyl modified nucleotides; Af, Cf, Gf, and Uf are 2′-fluoro modified nucleotides; o is a phosphodiester linkage; s is a phosphorothioate linkage; invAb is an inverted abasic residue (see, e.g., Table 11); cPrpu is a 5′-cyclopropyl phosphonate-2′-O-methyluridine modified nucleotide (see, e.g., Table 11); Tri-SM6.1-αvβ6-(TA14) is the tridentate αvβ6 epithelial cell targeting ligand having the structure shown in FIG. 1; and (TriAlk14) is the linking group as shown in Table 11, which is suitable for subsequent coupling to targeting ligands (See also, Example 1 herein).

[0074] FIG. 3A. Schematic diagram of the modified sense and antisense strands of the MUC5AC RNAi agent conjugate having the structure of AC000437 (see, e.g., Tables 9, 10, and 11), having a tridentate αvβ6 epithelial cell targeting ligand linked at the 5′ end of the sense strand.

[0075] FIG. 3B. Schematic diagram of the modified sense and antisense strands of the MUC5AC RNAi agent conjugate having the structure of AC000480 (see, e.g., Tables 9, 10, and 11), having a tridentate αvβ6 epithelial cell targeting ligand linked at the 5′ end of the sense strand.

[0076] FIG. 3C. Schematic diagram of the modified sense and antisense strands of the MUC5AC RNAi agent conjugate having the structure of AC000482 (see, e.g., Tables 9, 10, and 11), having a tridentate αvβ6 epithelial cell targeting ligand linked at the 5′ end of the sense strand.

[0077] FIG. 3D. Schematic diagram of the modified sense and antisense strands of the MUC5AC RNAi agent conjugate having the structure of AC001305 (see, e.g., Tables 9, 10, and 11), having a tridentate αvβ6 epithelial cell targeting ligand linked at the 5′ end of the sense strand.

[0078] FIG. 3E. Schematic diagram of the modified sense and antisense strands of the MUC5AC RNAi agent conjugate having the structure of AC001306 (see, e.g., Tables 9, 10, and 11), having a tridentate αvβ6 epithelial cell targeting ligand linked at the 5′ end of the sense strand.

[0079] FIG. 3F. Schematic diagram of the modified sense and antisense strands of the MUC5AC RNAi agent duplex having the structure of AD08089 (see, e.g., Tables 8 and 10), having a (TriAlk14) linker at the 5′ end of the sense strand.

[0080] FIG. 3G. Schematic diagram of the modified sense and antisense strands of the MUC5AC RNAi agent duplex having the structure of AD08174 (see, e.g., Tables 8 and 10), having a (TriAlk14) linker at the 5′ end of the sense strand.

[0081] FIG. 3H. Schematic diagram of the modified sense and antisense strands of the MUC5AC RNAi agent duplex having the structure of AD08173 (see, e.g., Tables 8 and 10), having a (TriAlk14) linker at the 5′ end of the sense strand.

[0082] FIG. 3I. Schematic diagram of the modified sense and antisense strands of the MUC5AC RNAi agent duplex having the structure of AD09240 (see, e.g., Tables 8 and 10), having a (TriAlk14) linker at the 5′ end of the sense strand.

[0083] FIG. 3J. Schematic diagram of the modified sense and antisense strands of the MUC5AC RNAi agent duplex having the structure of AD09241 (see, e.g., Tables 8 and 10), having a (TriAlk14) linker at the 5′ end of the sense strand.

### DETAILED DESCRIPTION

### RNAi Agents

[0084] Described herein are RNAi agents for inhibiting expression of a MUC5AC gene (referred to herein as MUC5AC RNAi agents or MUC5AC RNAi triggers). Each MUC5AC RNAi agent disclosed herein comprises a sense strand and an antisense strand. The sense strand can be 15 to 49 nucleotides in length. The antisense strand can be 18 to 49 nucleotides in length. The sense and antisense strands can be either the same length or they can be different lengths. In some embodiments, the sense and antisense strands are each independently 18 to 27 nucleotides in length. In some embodiments, both the sense and antisense strands are each 21-26 nucleotides in length. In some embodiments, the sense and antisense strands are each 21-24 nucleotides in length. In some embodiments, the sense and antisense strands are each independently 19-21 nucleotides in length. In some embodiments, the sense strand is about 19 nucleotides in length while the antisense strand is about 21 nucleotides in length. In some embodiments, the sense strand is about 21 nucleotides in length while the antisense strand is about 23 nucleotides in length. In some embodiments, a sense strand is 23 nucleotides in length and an antisense strand is 21 nucleotides in length. In some embodiments, both the sense and antisense strands are each 21 nucleotides in length. In some embodiments, the RNAi agent antisense strands are each independently 18, 19, 20, 21, 22, 23, 24, 25, 26, 27, 28, 29, or 30 nucleotides in length. In some embodiments, the RNAi agent sense strands are each independently 15, 16, 17, 18, 19, 20, 21, 22, 23, 24, 25, 26, 27, 28, 29, 30, 31, 32, 33, 34, 35, 36, 37, 38, 39, 40, 41, 42, 43, 44, 45, 46, 47, 48, or 49 nucleotides in length. The sense and antisense strands are annealed to form a duplex, and in some embodiments, a double-stranded RNAi agent has a duplex length of about 15, 16, 17, 18, 19, 20, 21, 22, 23 or 24 nucleotides.

[0085] Examples of nucleotide sequences used in forming MUC5AC RNAi agents are provided in Tables 2, 3, 4, 5, 6, 7, and 11. Examples of RNAi agent duplexes, that include the sense strand and antisense strand sequences in Tables 2, 3, 4, 5, 6, and 7 are shown in Tables 8A, 8B, 8C, 9, 10A, 10B, and 11.

[0086] In some embodiments, the region of perfect, substantial, or partial complementarity between the sense strand and the antisense strand is 15-26 (e.g., 15, 16, 17, 18, 19, 20, 21, 22, 23, 24, 25, or 26) nucleotides in length and occurs at or near the 5′ end of the antisense strand (e.g., this region may be separated from the 5′ end of the antisense strand by 0, 1, 2, 3, or 4 nucleotides that are not perfectly, substantially, or partially complementary).

[0087] A sense strand of the MUC5AC RNAi agents described herein includes at least 15 consecutive nucleotides that have at least 85% identity to a core stretch sequence (also referred to herein as a “core stretch” or “core sequence”) of the same number of nucleotides in an MUC5AC mRNA. In some embodiments, a sense strand core stretch sequence is 100% (perfectly) complementary or at least about 85% (substantially) complementary to a core stretch sequence in the antisense strand, and thus the sense strand core stretch sequence is typically perfectly identical or at least about 85% identical to a nucleotide sequence of the same length (sometimes referred to, e.g., as a target sequence) present in the MUC5AC mRNA target. In some embodiments, this sense strand core stretch is 15, 16, 17, 18, 19, 20, 21, 22, 23, or 24 nucleotides in length. In some embodiments, this sense strand core stretch is 17 nucleotides in length. In some embodiments, this sense strand core stretch is 19 nucleotides in length.

[0088] An antisense strand of a MUC5AC RNAi agent described herein includes at least 18 consecutive nucleotides that have at least 85% complementarity to a core stretch of the same number of nucleotides in an MUC5AC mRNA and to a core stretch of the same number of nucleotides in the corresponding sense strand. In some embodiments, an antisense strand core stretch is 100% (perfectly) complementary or at least about 85% (substantially) complementary to a nucleotide sequence (e.g., target sequence) of the same length present in the MUC5AC mRNA target. In some embodiments, this antisense strand core stretch is 15, 16, 17, 18, 19, 20, 21, 22, 23, or 24 nucleotides in length. In some embodiments, this antisense strand core stretch is 19 nucleotides in length. In some embodiments, this antisense strand core stretch is 17 nucleotides in length. In some embodiments, this antisense strand core stretch is 21 nucleotides in length. A sense strand core stretch sequence can be the same length as a corresponding antisense core stretch sequence or it can be a different length.

[0089] The MUC5AC RNAi agent sense and antisense strands anneal to form a duplex. A sense strand and an antisense strand of a MUC5AC RNAi agent can be partially, substantially, or fully complementary to each other. Within the complementary duplex region, the sense strand core stretch sequence is at least 85% complementary or 100% complementary to the antisense core stretch sequence. In some embodiments, the sense strand core stretch sequence contains a sequence of at least 15, at least 16, at least 17, at least 18, at least 19, at least 20, at least 21, at least 22, or at least 23 nucleotides that is at least 85% or 100% complementary to a corresponding 15, 16, 17, 18, 19, 20, 21, 22, 23, or 24 nucleotide sequence of the antisense strand core stretch sequence (i.e., the sense and antisense core stretch sequences of a MUC5AC RNAi agent have a region of at least 15, at least 16, at least 17, at least 18, at least 19, at least 20, at least 21, at least 22, at least 23, or at least 24 nucleotides that is at least 85% base paired or 100% base paired.)

[0090] In some embodiments, the antisense strand of a MUC5AC RNAi agent disclosed herein differs by 0, 1, 2, or 3 nucleotides from any of the antisense strand sequences in Table 2, Table 3, or Table 11. In some embodiments, the sense strand of a MUC5AC RNAi agent disclosed herein differs by 0, 1, 2, or 3 nucleotides from any of the sense strand sequences in Table 2, Table 4, Table 5, Table 6, Table 7, or Table 11.

[0091] In some embodiments, the sense strand and/or the antisense strand can optionally and independently contain an additional 1, 2, 3, 4, 5, or 6 nucleotides (extension) at the 3′ end, the 5′ end, or both the 3′ and 5′ ends of the core stretch sequences. The antisense strand additional nucleotides, if present, may or may not be complementary to the corresponding sequence in the MUC5AC mRNA. The sense strand additional nucleotides, if present, may or may not be identical to the corresponding sequence in the MUC5AC mRNA. The antisense strand additional nucleotides, if present, may or may not be complementary to the corresponding sense strand's additional nucleotides, if present.

[0092] As used herein, an extension comprises 1, 2, 3, 4, 5, or 6 nucleotides at the 5′ and/or 3′ end of the sense strand core stretch sequence and/or antisense strand core stretch sequence. The extension nucleotides on a sense strand may or may not be complementary to nucleotides, either core stretch sequence nucleotides or extension nucleotides, in the corresponding antisense strand. Conversely, the extension nucleotides on an antisense strand may or may not be complementary to nucleotides, either core stretch nucleotides or extension nucleotides, in the corresponding sense strand. In some embodiments, both the sense strand and the antisense strand of an RNAi agent contain 3′ and 5′ extensions. In some embodiments, one or more of the 3′ extension nucleotides of one strand base pairs with one or more 5′ extension nucleotides of the other strand. In other embodiments, one or more of 3′ extension nucleotides of one strand do not base pair with one or more 5′ extension nucleotides of the other strand. In some embodiments, a MUC5AC RNAi agent has an antisense strand having a 3′ extension and a sense strand having a 5′ extension. In some embodiments, the extension nucleotide(s) are unpaired and form an overhang. As used herein, an “overhang” refers to an extension or stretch of one or more unpaired nucleotides located at a terminal end of either the sense strand or the antisense strand that does not form part of the hybridized or duplexed portion of an RNAi agent disclosed herein.

[0093] In some embodiments, a MUC5AC RNAi agent comprises an antisense strand having a 3′ extension of 1, 2, 3, 4, 5, or 6 nucleotides in length. In other embodiments, a MUC5AC RNAi agent comprises an antisense strand having a 3′ extension of 1, 2, or 3 nucleotides in length. In some embodiments, one or more of the antisense strand extension nucleotides comprise nucleotides that are complementary to the corresponding MUC5AC mRNA sequence. In some embodiments, one or more of the antisense strand extension nucleotides comprise nucleotides that are not complementary to the corresponding MUC5AC mRNA sequence.

[0094] In some embodiments, a MUC5AC RNAi agent comprises a sense strand having a 3′ extension of 1, 2, 3, 4, or 5 nucleotides in length. In some embodiments, one or more of the sense strand extension nucleotides comprises adenosine, uracil, or thymidine nucleotides, AT dinucleotide, or nucleotides that correspond to or are the identical to nucleotides in the MUC5AC mRNA sequence. In some embodiments, the 3′ sense strand extension includes or consists of one of the following sequences, but is not limited to: T, UT, TT, UU, UUT, TTT, or TTTT (each listed 5′ to 3′).

[0095] A sense strand can have a 3′ extension and/or a 5′ extension. In some embodiments, a MUC5AC RNAi agent comprises a sense strand having a 5′ extension of 1, 2, 3, 4, 5, or 6 nucleotides in length. In some embodiments, one or more of the sense strand extension nucleotides comprise nucleotides that correspond to or are identical to nucleotides in the MUC5AC mRNA sequence.

[0096] Examples of sequences used in forming MUC5AC RNAi agents are provided in Tables 2, 3, 4, 5, 6, 7, and 11. In some embodiments, a MUC5AC RNAi agent antisense strand includes a sequence of any of the sequences in Tables 2, 3, or 11. In certain embodiments, a MUC5AC RNAi agent antisense strand comprises or consists of any one of the modified sequences in Table 3. In some embodiments, a MUC5AC RNAi agent antisense strand includes the sequence of nucleotides (from 5′ end→3′ end) 1-17, 2-17, 1-18, 2-18, 1-19, 2-19, 1-20, 2-20, 1-21, or 2-21, of any of the sequences in Table 2, Table 3, or Table 11. In some embodiments, a MUC5AC RNAi agent sense strand includes the sequence of any of the sequences in Tables 2, 4, 5, 6, or 7. In some embodiments, a MUC5AC RNAi agent sense strand includes the sequence of nucleotides (from 5′ end→3′ end) 1-18, 1-19, 1-20, 1-21, 2-19, 2-20, 2-21, 3-20, 3-21, or 4-21 of any of the sequences in Tables 2, 4, 5, 6, or 7. In certain embodiments, a MUC5AC RNAi agent sense strand comprises or consists of a modified sequence of any one of the modified sequences in Table 4, 5, 6, 7, or 11.

[0097] In some embodiments, the sense and antisense strands of the RNAi agents described herein contain the same number of nucleotides. In some embodiments, the sense and antisense strands of the RNAi agents described herein contain different numbers of nucleotides. In some embodiments, the sense strand 5′ end and the antisense strand 3′ end of an RNAi agent form a blunt end. In some embodiments, the sense strand 3′ end and the antisense strand 5′ end of an RNAi agent form a blunt end. In some embodiments, both ends of an RNAi agent form blunt ends. In some embodiments, neither end of an RNAi agent is blunt-ended. As used herein a “blunt end” refers to an end of a double stranded RNAi agent in which the terminal nucleotides of the two annealed strands are complementary (form a complementary base-pair).

[0098] In some embodiments, the sense strand 5′ end and the antisense strand 3′ end of an RNAi agent form a frayed end. In some embodiments, the sense strand 3′ end and the antisense strand 5′ end of an RNAi agent form a frayed end. In some embodiments, both ends of an RNAi agent form a frayed end. In some embodiments, neither end of an RNAi agent is a frayed end. As used herein a frayed end refers to an end of a double stranded RNAi agent in which the terminal nucleotides of the two annealed strands form a pair (i.e., do not form an overhang) but are not complementary (i.e. form a non-complementary pair). In some embodiments, one or more unpaired nucleotides at the end of one strand of a double stranded RNAi agent form an overhang. The unpaired nucleotides may be on the sense strand or the antisense strand, creating either 3′ or 5′ overhangs. In some embodiments, the RNAi agent contains: a blunt end and a frayed end, a blunt end and 5′ overhang end, a blunt end and a 3′ overhang end, a frayed end and a 5′ overhang end, a frayed end and a 3′ overhang end, two 5′ overhang ends, two 3′ overhang ends, a 5′ overhang end and a 3′ overhang end, two frayed ends, or two blunt ends. Typically, when present, overhangs are located at the 3′ terminal ends of the sense strand, the antisense strand, or both the sense strand and the antisense strand.

[0099] The MUC5AC RNAi agents disclosed herein may also be comprised of one or more modified nucleotides. In some embodiments, substantially all of the nucleotides of the sense strand and substantially all of the nucleotides of the antisense strand of the MUC5AC RNAi agent are modified nucleotides. The MUC5AC RNAi agents disclosed herein may further be comprised of one or more modified internucleoside linkages, e.g., one or more phosphorothioate linkages or phosphorodithioate linkages. In some embodiments, a MUC5AC RNAi agent contains one or more modified nucleotides and one or more modified internucleoside linkages. In some embodiments, a 2′-modified nucleotide is combined with modified internucleoside linkage.

[0100] In some embodiments, a MUC5AC RNAi agent is prepared or provided as a salt, mixed salt, or a free-acid. In some embodiments, a MUC5AC RNAi agent is prepared as a pharmaceutically acceptable salt. In some embodiments, a MUC5AC RNAi agent is prepared as a pharmaceutically acceptable sodium salt. Such forms that are well known in the art are within the scope of the inventions disclosed herein.

### Modified Nucleotides

[0101] Modified nucleotides, when used in various oligonucleotide constructs, can preserve activity of the compound in cells while at the same time increasing the serum stability of these compounds, and can also minimize the possibility of activating interferon activity in humans upon administration of the oligonucleotide construct.

[0102] In some embodiments, a MUC5AC RNAi agent contains one or more modified nucleotides. As used herein, a “modified nucleotide” is a nucleotide other than a ribonucleotide (2′-hydroxyl nucleotide). In some embodiments, at least 50% (e.g., at least 60%, at least 70%, at least 80%, at least 90%, at least 95%, at least 97%, at least 98%, at least 99%, or 100%) of the nucleotides are modified nucleotides. As used herein, modified nucleotides can include, but are not limited to, deoxyribonucleotides, nucleotide mimics, abasic nucleotides, 2′-modified nucleotides, inverted nucleotides, modified nucleobase-comprising nucleotides, bridged nucleotides, peptide nucleic acids (PNAs), 2′,3′-seco nucleotide mimics (unlocked nucleobase analogues), locked nucleotides, 3′-O-methoxy (2′ internucleoside linked) nucleotides, 2′-F-Arabino nucleotides, 5′-Me, 2′-fluoro nucleotide, morpholino nucleotides, vinyl phosphonate deoxyribonucleotides, vinyl phosphonate containing nucleotides, and cyclopropyl phosphonate containing nucleotides. 2′-modified nucleotides (i.e., a nucleotide with a group other than a hydroxyl group at the 2′ position of the five-membered sugar ring) include, but are not limited to, 2′-O-methyl nucleotides (also referred to as 2′-methoxy nucleotides), 2′-fluoro nucleotides (also referred to herein as 2′-deoxy-2′-fluoro nucleotides), 2′-deoxy nucleotides, 2′-methoxyethyl (2′-O-2-methoxylethyl) nucleotides (also referred to as 2′-MOE), 2′-amino nucleotides, and 2′-alkyl nucleotides. It is not necessary for all positions in a given compound to be uniformly modified. Conversely, more than one modification can be incorporated in a single MUC5AC RNAi agent or even in a single nucleotide thereof. The MUC5AC RNAi agent sense strands and antisense strands can be synthesized and/or modified by methods known in the art. Modification at one nucleotide is independent of modification at another nucleotide.

[0103] Modified nucleobases include synthetic and natural nucleobases, such as 5-substituted pyrinidines, 6-azapyrimidines and N-2, N-6 and 0-6 substituted purines, (e.g., 2-aminopropyladenine, 5-propynyluracil, or 5-propynylcytosine), 5-methylcytosine (5-me-C), 5-hydroxymethyl cytosine, inosine, xanthine, hypoxanthine, 2-aminoadenine, 6-alkyl (e.g., 6-methyl, 6-ethyl, 6-isopropyl, or 6-n-butyl) derivatives of adenine and guanine, 2-alkyl (e.g., 2-methyl, 2-ethyl, 2-isopropyl, or 2-n-butyl) and other alkyl derivatives of adenine and guanine, 2-thiouracil, 2-thiothynine, 2-thiocytosine, 5-halouracil, cytosine, 5-propynyl uracil, 5-propynyl cytosine, 6-azo uracil, 6-azo cytosine, 6-azo thymine, 5-uracil (pseudouracil), 4-thiouracil, 8-halo, 8-amino, 8-sulflydryl, 8-thioalkyl, 8-hydroxyl and other 8-substituted adenines and guanines, 5-halo (e.g., 5-bromo), 5-trifluoromethyl, and other 5-substituted uracils and cytosines, 7-methylguanine and 7-m-ethyladenine, 8-azaguanine and 8-azaadenine, 7-deazaguanine, 7-deazaadenine, 3-deazaguanine, and 3-deazaadenine.

[0104] In some embodiments, the 5′ and/or 3′ end of the antisense strand can include abasic residues (Ab), which can also be referred to as an “abasic site” or “abasic nucleotide.” An abasic residue (Ab) is a nucleotide or nucleoside that lacks a nucleobase at the 1′ position of the sugar moiety. (See, e.g., U.S. Pat. No. 5,998,203). In some embodiments, an abasic residue can be placed internally in a nucleotide sequence. In some embodiments, Ab or AbAb can be added to the 3′ end of the antisense strand. In some embodiments, the 5′ end of the sense strand can include one or more additional abasic residues (e.g., (Ab) or (AbAb)). In some embodiments, UUAb, UAb, or Ab are added to the 3′ end of the sense strand. In some embodiments, an abasic (deoxyribose) residue can be replaced with a ribitol (abasic ribose) residue.

[0105] In some embodiments, all or substantially all of the nucleotides of an RNAi agent are modified nucleotides. As used herein, an RNAi agent wherein substantially all of the nucleotides present are modified nucleotides is an RNAi agent having four or fewer (i.e., 0, 1, 2, 3, or 4) nucleotides in both the sense strand and the antisense strand being ribonucleotides (i.e., unmodified). As used herein, a sense strand wherein substantially all of the nucleotides present are modified nucleotides is a sense strand having two or fewer (i.e., 0, 1, or 2) nucleotides in the sense strand being unmodified ribonucleotides. As used herein, an antisense sense strand wherein substantially all of the nucleotides present are modified nucleotides is an antisense strand having two or fewer (i.e., 0, 1, or 2) nucleotides in the antisense strand being unmodified ribonucleotides. In some embodiments, one or more nucleotides of an RNAi agent is an unmodified ribonucleotide. Chemical structures for certain modified nucleotides are set forth in Table 12 herein.

### Modified Internucleoside Linkages

[0106] In some embodiments, one or more nucleotides of a MUC5AC RNAi agent are linked by non-standard linkages or backbones (i.e., modified internucleoside linkages or modified backbones). Modified internucleoside linkages or backbones include, but are not limited to, phosphorothioate groups (represented herein as a lower case “s”), chiral phosphorothioates, thiophosphates, phosphorodithioates, phosphotriesters, aminoalkyl-phosphotriesters, alkyl phosphonates (e.g., methyl phosphonates or 3′-alkylene phosphonates), chiral phosphonates, phosphinates, phosphoramidates (e.g., 3′-amino phosphoramidate, aminoalkylphosphoramidates, or thionophosphoramidates), thionoalkyl-phosphonates, thionoalkylphosphotriesters, morpholino linkages, boranophosphates having normal 3′-5′ linkages, 2′-5′ linked analogs of boranophosphates, or boranophosphates having inverted polarity wherein the adjacent pairs of nucleoside units are linked 3′-5′ to 5′-3′ or 2′-5′ to 5′-2′. In some embodiments, a modified internucleoside linkage or backbone lacks a phosphorus atom. Modified internucleoside linkages lacking a phosphorus atom include, but are not limited to, short chain alkyl or cycloalkyl inter-sugar linkages, mixed heteroatom and alkyl or cycloalkyl inter-sugar linkages, or one or more short chain heteroatomic or heterocyclic inter-sugar linkages. In some embodiments, modified internucleoside backbones include, but are not limited to, siloxane backbones, sulfide backbones, sulfoxide backbones, sulfone backbones, formacetyl and thioformacetyl backbones, methylene formacetyl and thioformacetyl backbones, alkene-containing backbones, sulfamate backbones, methyleneimino and methylenehydrazino backbones, sulfonate and sulfonamide backbones, amide backbones, and other backbones having mixed N, O, S, and CH₂ components.

[0107] In some embodiments, a sense strand of a MUC5AC RNAi agent can contain 1, 2, 3, 4, 5, or 6 phosphorothioate linkages, an antisense strand of a MUC5AC RNAi agent can contain 1, 2, 3, 4, 5, or 6 phosphorothioate linkages, or both the sense strand and the antisense strand independently can contain 1, 2, 3, 4, 5, or 6 phosphorothioate linkages. In some embodiments, a sense strand of a MUC5AC RNAi agent can contain 1, 2, 3, or 4 phosphorothioate linkages, an antisense strand of a MUC5AC RNAi agent can contain 1, 2, 3, or 4 phosphorothioate linkages, or both the sense strand and the antisense strand independently can contain 1, 2, 3, or 4 phosphorothioate linkages.

[0108] In some embodiments, a MUC5AC RNAi agent sense strand contains at least two phosphorothioate internucleoside linkages. In some embodiments, the phosphorothioate internucleoside linkages are between the nucleotides at positions 1-3 from the 3′ end of the sense strand. In some embodiments, one phosphorothioate internucleoside linkage is at the 5′ end of the sense strand nucleotide sequence, and another phosphorothioate linkage is at the 3′ end of the sense strand nucleotide sequence. In some embodiments, two phosphorothioate internucleoside linkage are located at the 5′ end of the sense strand, and another phosphorothioate linkage is at the 3′ end of the sense strand. In some embodiments, the sense strand does not include any phosphorothioate internucleoside linkages between the nucleotides, but contains one, two, or three phosphorothioate linkages between the terminal nucleotides on both the 5′ and 3′ ends and the optionally present inverted abasic residue terminal caps. In some embodiments, the targeting ligand is linked to the sense strand via a phosphorothioate linkage.

[0109] In some embodiments, a MUC5AC RNAi agent antisense strand contains four phosphorothioate internucleoside linkages. In some embodiments, the four phosphorothioate internucleoside linkages are between the nucleotides at positions 1-3 from the 5′ end of the antisense strand and between the nucleotides at positions 19-21, 20-22, 21-23, 22-24, 23-25, or 24-26 from the 5′ end. In some embodiments, three phosphorothioate internucleoside linkages are located between positions 1-4 from the 5′ end of the antisense strand, and a fourth phosphorothioate internucleoside linkage is located between positions 20-21 from the 5′ end of the antisense strand. In some embodiments, a MUC5AC RNAi agent contains at least three or four phosphorothioate internucleoside linkages in the antisense strand.

### Capping Residues or Moieties

[0110] In some embodiments, the sense strand may include one or more capping residues or moieties, sometimes referred to in the art as a “cap,” a “terminal cap,” or a “capping residue.” As used herein, a “capping residue” is a non-nucleotide compound or other moiety that can be incorporated at one or more termini of a nucleotide sequence of an RNAi agent disclosed herein. A capping residue can provide the RNAi agent, in some instances, with certain beneficial properties, such as, for example, protection against exonuclease degradation. In some embodiments, inverted abasic residues (invAb) (also referred to in the art as “inverted abasic sites”) are added as capping residues (see Table 12). (See, e.g., F. Czauderna, Nucleic Acids Res., 2003, 31(11), 2705-16). Capping residues are generally known in the art, and include, for example, inverted abasic residues as well as carbon chains such as a terminal C₃H₇ (propyl), C₆H₁₃ (hexyl), or C₁₂H₂₅ (dodecyl) groups. In some embodiments, a capping residue is present at either the 5′ terminal end, the 3′ terminal end, or both the 5′ and 3′ terminal ends of the sense strand. In some embodiments, the 5′ end and/or the 3′ end of the sense strand may include more than one inverted abasic deoxyribose moiety as a capping residue.

[0111] In some embodiments, one or more inverted abasic residues (invAb) are added to the 3′ end of the sense strand. In some embodiments, one or more inverted abasic residues (invAb) are added to the 5′ end of the sense strand. In some embodiments, one or more inverted abasic residues or inverted abasic sites are inserted between the targeting ligand and the nucleotide sequence of the sense strand of the RNAi agent. In some embodiments, the inclusion of one or more inverted abasic residues or inverted abasic sites at or near the terminal end or terminal ends of the sense strand of an RNAi agent allows for enhanced activity or other desired properties of an RNAi agent.

[0112] In some embodiments, one or more inverted abasic residues (invAb) are added to the 5′ end of the sense strand. In some embodiments, one or more inverted abasic residues can be inserted between the targeting ligand and the nucleotide sequence of the sense strand of the RNAi agent. The inverted abasic residues may be linked via phosphate, phosphorothioate (e.g., shown herein as (invAb)s)), or other internucleoside linkages. In some embodiments, the inclusion of one or more inverted abasic residues at or near the terminal end or terminal ends of the sense strand of an RNAi agent may allow for enhanced activity or other desired properties of an RNAi agent. In some embodiments, an inverted abasic (deoxyribose) residue can be replaced with an inverted ribitol (abasic ribose) residue. In some embodiments, the 3′ end of the antisense strand core stretch sequence, or the 3′ end of the antisense strand sequence, may include an inverted abasic residue. The chemical structures for inverted abasic deoxyribose residues are shown in Table 12 below.

### MUC5AC RNAi Agents

[0113] The MUC5AC RNAi agents disclosed herein are designed to target specific positions on a MUC5AC gene (e.g., SEQ ID NO: 1 (NM_001304359.2)). As defined herein, an antisense strand sequence is designed to target a MUC5AC gene at a given position on the gene when the 5′ terminal nucleobase of the antisense strand is aligned with a position that is 19 nucleotides downstream (towards the 3′ end) from the position on the gene when base pairing to the gene. For example, as illustrated in Tables 1 and 2 herein, an antisense strand sequence designed to target a MUC5AC gene at position 3535 requires that when base pairing to the gene, the 5′ terminal nucleobase of the antisense strand is aligned with position 3553 of a MUC5AC gene.

[0114] As provided herein, a MUC5AC RNAi agent does not require that the nucleobase at position 1 (5′→3′) of the antisense strand be complementary to the gene, provided that there is at least 85% complementarity (e.g., at least 85, 86, 87, 88, 89, 90, 91, 92, 93, 94, 95, 96, 97, 98, 99, or 100% complementarity) of the antisense strand and the gene across a core stretch sequence of at least 16 consecutive nucleotides. For example, for a MUC5AC RNAi agent disclosed herein that is designed to target position 3535 of a MUC5AC gene, the 5′ terminal nucleobase of the antisense strand of the of the MUC5AC RNAi agent must be aligned with position 3553 of the gene; however, the 5′ terminal nucleobase of the antisense strand may be, but is not required to be, complementary to position 3553 of a MUC5AC gene, provided that there is at least 85% complementarity (e.g., at least 85, 86, 87, 88, 89, 90, 91, 92, 93, 94, 95, 96, 97, 98, 99, or 100% o complementarity) of the antisense strand and the gene across a core stretch sequence of at least 16 consecutive nucleotides. As shown by, among other things, the various examples disclosed herein, the specific site of binding of the gene by the antisense strand of the MUC5AC RNAi agent (e.g., whether the MUC5AC RNAi agent is designed to target a MUC5AC gene at position 3535, at position 4993, at position 15051, or at some other position) is an important factor to the level of inhibition achieved by the MUC5AC RNAi agent. (See also, Kamola et al., The siRNA Non-seed Region and Its Target Sequences are Auxiliary Determinants of Off-Target Effects, PLOS Computational Biology, 11(12), FIG. 1 (2015)).

[0115] In some embodiments, the MUC5AC RNAI agents disclosed herein target a MUC5AC gene at or near the positions of the MUC5AC sequence shown in Table 1. In some embodiments, the antisense strand of a MUC5AC RNAi agent disclosed herein includes a core stretch sequence that is fully, substantially, or at least partially complementary to a target MUC5AC 19-mer sequence disclosed in Table 1

TABLE 1
MUC5AC 19-mer mRNA Target Sequences (taken from
homo sapiens mucin 5AC, oligomeric mucus/gel-
forming (MUC5AC) gene transcript, GenBank
NM_001304359.2 (SEQ ID NO: 1))

| | | Corres- | Targeted |
|---|---|---|---|
| | | ponding | Gene |
| SEQ | MUC5AC 19-mer | Positions of | Position (as |
| ID | Target Sequences | Sequence on | referred |
| No. | (5′→3′) | SEQ ID NO: 1 | to herein) |
| 2 | GCUUCCACUACAAGACCUU | 304-322 | 304 |
| 3 | UGUGGAACCACGAUGACAG | 610-628 | 610 |
| 4 | GCAAGACCUCUGCUUCUGU | 923-941 | 923 |
| 5 | CACAGACUGCACCAACUGC | 1277-1295 | 1277 |
| 6 | CAGUGCCUUCACUGUACUG | 1445-1463 | 1445 |
| 7 | AGUGCCUUCACUGUACUGC | 1446-1464 | 1446 |
| 8 | CAGCGAGACCUGCCUGAAG | 1493-1511 | 1493 |
| 9 | GGGAAGUGUUCCUGAACCA | 1567-1585 | 1567 |
| 10 | AACGUCACCAUCUUCAGAC | 1617-1635 | 1617 |
| 11 | ACGUCACCAUCUUCAGACC | 1618-1636 | 1618 |
| 12 | UGUGGGAACUUCAACAGCA | 1758-1776 | 1758 |
| 13 | GGGAACUUCAACAGCAUCC | 1761-1779 | 1761 |
| 14 | UCCAGGCCGAUGACUUCCG | 1777-1795 | 1777 |
| 15 | CUUCUUCAACACCUUCAAG | 1832-1850 | 1832 |
| 16 | UUCAACACCUUCAAGACCC | 1836-1854 | 1836 |
| 17 | CCAACAUCAGGAACAGCUU | 1867-1885 | 1867 |
| 18 | CAUCAGGAACAGCUUCGAG | 1871-1889 | 1871 |
| 19 | AGUAUGCUCAGCACUGGUG | 1921-1939 | 1921 |
| 20 | ACCUACUACUCGAACUGCA | 2001-2019 | 2001 |
| 21 | UACUACUCGAACUGCAUGU | 2004-2022 | 2004 |
| 22 | ACAUCACCUGCAGUGUUGG | 2230-2248 | 2230 |
| 23 | CACCUGCAGUGUUGGCUUC | 2234-2252 | 2234 |
| 24 | UGGACAUGACCUGUUACAG | 2536-2554 | 2536 |
| 25 | AGAGCUACAGCUUCAACGG | 2797-2815 | 2797 |
| 26 | AGGGACCACCUGCUCCAAG | 2915-2933 | 2915 |
| 27 | CUGCUCCAAGGCCAUCAAG | 2924-2942 | 2924 |
| 28 | UGCUCCAAGGCCAUCAAGA | 2925-2943 | 2925 |
| 29 | CUCCAAGGCCAUCAAGAUU | 2927-2945 | 2927 |
| 30 | GACAAGAAGACCAGCAUCU | 3090-3108 | 3090 |
| 31 | AGACCAGCAUCUUCAUCAA | 3097-3115 | 3097 |
| 32 | ACCAGCAUCUUCAUCAACC | 3099-3117 | 3099 |
| 33 | CCUCAGCCCCGAGUUCAAG | 3116-3134 | 3116 |
| 34 | UGGGAACUUCGACGACAUC | 3155-3173 | 3155 |
| 35 | CAGAAGCAGUGCAGCAUCC | 3321-3339 | 3321 |
| 36 | CAGGCCUGCCAUGAAGUUU | 3475-3493 | 3475 |
| 37 | CCCUCUGUUCUGCGACUAC | 3530-3548 | 3530 |
| 38 | CCUCUGUUCUGCGACUACU | 3531-3549 | 3531 |
| 39 | UCUGUUCUGCGACUACUAC | 3533-3551 | 3533 |
| 40 | CUGUUCUGCGACUACUACA | 3534-3552 | 3534 |
| 41 | UGUUCUGCGACUACUACAA | 3535-3553 | 3535 |
| 42 | UCUUUGAUGAGGACAAGAU | 3694-3712 | 3694 |
| 43 | CUUUGAUGAGGACAAGAUG | 3695-3713 | 3695 |
| 44 | UUUGAUGAGGACAAGAUGC | 3696-3714 | 3696 |
| 45 | ACGUCAUCUACCACACGAC | 3910-3928 | 3910 |
| 46 | UGCUACAACUACCAGAUCA | 4443-4461 | 4443 |
| 47 | UACAACUACCAGAUCAGGG | 4446-4464 | 4446 |
| 48 | CUGAUUUGCCUGAACAAGA | 4992-5010 | 4992 |
| 49 | UGAUUUGCCUGAACAAGAA | 4993-5011 | 4993 |
| 50 | CACCCAUCUGCUACAACUA | 5020-5038 | 5020 |
| 51 | ACCCAUCUGCUACAACUAU | 5021-5039 | 5021 |
| 52 | UGCUACAACUAUGAGAUCC | 5028-5046 | 5028 |
| 53 | GCUACAACUAUGAGAUCCG | 5029-5047 | 5029 |
| 54 | GAUCCGCAUCCAGUGUUGC | 5042-5060 | 5042 |
| 55 | AAAGUGGUUCGACGUGGAC | 5297-5315 | 5297 |
| 56 | GUGGUUCGACGUGGACUUC | 5300-5318 | 5300 |
| 57 | GGUUCGACGUGGACUUCCC | 5302-5320 | 5302 |
| 58 | AAGGAAACCUACAACAACA | 5346-5364 | 5346 |
| 59 | AGGAAACCUACAACAACAU | 5347-5365 | 5347 |
| 60 | AAACCUACAACAACAUCAU | 5350-5368 | 5350 |
| 61 | AGAGGUGAGCAUCGAACAC | 5441-5459 | 5441 |
| 62 | GCAGGGACCCUUCAAGAUG | 5519-5537 | 5519 |
| 63 | AGAUGUGCCUCAACUACGA | 5533-5551 | 5533 |
| 64 | AUGUGCCUCAACUACGAGG | 5535-5553 | 5535 |
| 65 | ACCUCCUCUUGGCAGAAAU | 6777-6795 | 6777 |
| 66 | AGGACAACCACUUUGGUGA | 6798-6816 | 6798 |
| 67 | CUCUGCUCCUACAACUAGC | 6998-7016 | 6998 |
| 68 | ACCUCUGCUUCUACAACUA | 7980-7998 | 7980 |
| 69 | AUAACCAGCACAACUUCUG | 8448-8466 | 8448 |
| 70 | ACCAGAACAACCUCUGCUC | 8739-8757 | 8739 |
| 71 | CUACAACCAGCACAAUCUC | 9310-9328 | 9310 |
| 72 | UGGACCAAGUGGUUUGACA | 9729-9747 | 9729 |
| 73 | ACAACCAGCACAACUUCUG | 10206-10224 | 10206 |
| 74 | CAACCACUUUGGUGACAAG | 11014-11032 | 11014 |
| 75 | ACAACCAACACAACUUCUG | 11361-11379 | 11361 |
| 76 | CUCUGCUCCUACAACUAGC | 12965-12983 | 12965 |
| 77 | GAGAUCAUCUUCAACAACA | 15051-15069 | 15051 |
| 78 | AGAUCAUCUUCAACAACAA | 15052-15070 | 15052 |

[0116] Homo sapiens mucin 5AC, oligomeric mucus/gel-forming (MUC5AC) gene transcript, GenBank NM_001304359.2 (SEQ ID NO:1) (17,448 bases):

| | |
|---|---|
| 1 | ctcagaggct gctgagggac agggcactct tccccgccgt ccacacaatg agtgttggcc |
| 61 | ggaggaagct ggccctgctc tgggccctgg ctctcgctct ggcctgcacc cggcatacag |
| 121 | gccatgccca ggatggctcc tccgaatcca gctacaagca ccaccctgcc ctctctccta |
| 181 | tcgcccgggg gcccagcggg gtcccgctcc gtggggcgac tgtcttccca tctctgagga |
| 241 | ccatccctgt ggtacgagcc tccaacccgg cgcacaacgg gcgggtgtgc agcacctggg |
| 301 | gcagcttcca ctacaagacc ttcgacggcg acgtcttccg cttccccggc ctctgcaact |
| 361 | acgtgttctc cgagcactgc ggtgccgcct acgaggattt taacatccag ctacgccgca |
| 421 | gccaggagtc agcggccccc acgctgagca gggtcctcat gaaggtggat ggcgtggtca |
| 481 | tccagctgac caagggctcc gtcctggtca acggccaccc ggtcctgctg cccttcagcc |
| 541 | agtctggggt cctcattcag cagagcagca gctacaccaa ggtggaggcc aggctgggcc |
| 601 | ttgtcctcat gtggaaccac gatgacagcc tgctgctgga gctggacacc aaatacgcca |
| 661 | acaagacctg tgggctctgt ggggacttca acgggatgcc cgtggtcagc gagctcctct |
| 721 | cccacaacac caagctgaca cccatggaat tcgggaacct gcagaagatg gacgacccca |
| 781 | cggaccagtg tcaggaccct gtccctgaac ccccgaggaa ctgctccact ggctttggca |
| 841 | tctgtgagga gctcctgcac ggccagctgt tctctggctg cgtggccctg gtggacgtcg |
| 901 | gcagctacct ggaggcttgc aggcaagacc tctgcttctg tgaagacacc gacctgctca |
| 961 | gctgcgtctg ccacaccctt gccgagtact cccggcagtg cacccatgca ggggggttgc |
| 1021 | cccaggactg gcggggccct gacttctgcc cccagaagtg ccccaacaac atgcagtacc |
| 1081 | acgagtgccg ctccccctgc gcagacacct gctccaacca ggagcactcc cgggcctgtg |
| 1141 | aggaccactg tgtggccggc tgcttctgcc ctgaggggac ggtgcttgac gacatcggcc |
| 1201 | agaccggctg tgtccctgtg tcaaagtgtg cctgcgtcta caacggggct gcctatgccc |
| 1261 | caggggccac ctactccaca gactgcacca actgcacctg ctccggaggc cggtggagct |
| 1321 | gccaggaggt tccatgcccg ggtacctgct ctgtgcttgg aggtgcccac ttctcaacgt |
| 1381 | ttgacgggaa gcaatacacg gtgcacggcg actgcagcta tgtgctgacc aagccctgtg |
| 1441 | acagcagtgc cttcactgta ctggctgagc tgcgcaggtg cgggctgacg gacagcgaga |
| 1501 | cctgcctgaa gagcgtgaca ctgagcctgg atggggcgca gacggtggtg gtgatcaagg |
| 1561 | ccagtgggga agtgttcctg aaccagatct acacccagct gcccatctct gcagccaacg |
| 1621 | tcaccatctt cagaccctca accttcttca tcatcgccca gaccagcctg ggcctgcagc |
| 1681 | tgaacctgca gctggtgccc accatgcagc tgttcatgca gctggcgccc aagctccgtg |
| 1741 | ggcagacctg cggtctctgt gggaacttca acagcatcca ggccgatgac ttccggaccc |
| 1801 | tcagtggggt ggtggaggcc accgctgcgg ccttcttcaa caccttcaag acccaggccg |
| 1861 | cctgccccaa catcaggaac agcttcgagg acccctgctc tctgagcgtg gagaatgaga |
| 1921 | agtatgctca gcactggtgc tcgcagctga ccgatgccga cggccccttc ggccggtgcc |
| 1981 | atgctgccgt gaagccggga acctactact cgaactgcat gtttgacacc tgcaactgtg |
| 2041 | agcggagcga ggactgcctg tgcgccgcgc tgtcctccta cgtgcacgcc tgtgccgcca |
| 2101 | agggcgtgca gctcggcggc tggagggacg gcgtctgcac gaagcctatg accacttgcc |
| 2161 | ccaagtcaat gacgtaccac taccatgtca gcacctgcca gcccacctgc cgctccctga |
| 2221 | gcgaggggga catcacctgc agtgttggct tcatccccgt ggatggctgc atctgtccca |
| 2281 | agggcacctt cctggacgac acgggcaagt gtgtgcaggc cagcaactgt ccctgctacc |
| 2341 | acagaggctc catgatcccc aatggggagt cggtgcacga cagcggggct atctgcacct |
| 2401 | gcacacatgg gaagctgagc tgcatcggag gccaagcccc cgccccagtg tgtgctgcgc |
| 2461 | ccatggtgtt ctttgactgc cgaaatgcca cgcccgggga cacaggggct ggctgtcaga |
| 2521 | agagctgcca cacactggac atgacctgtt acagccccca gtgtgtgcct ggctgcgtgt |
| 2581 | gccccgacgg gctggtggcg gacggcgagg gcggctgcat cactgcggag gactgcccct |
| 2641 | gcgtgcacaa tgaggccagc taccgggccg gccagaccat ccgggtgggc tgcaacacct |
| 2701 | gcacctgtga cagcaggatg tggcggtgca cagatgaccc ctgcctggcc acctgcgccg |
| 2761 | tgtacgggga cggccactac ctcaccttcg acggacagag ctacagcttc aacggagact |
| 2821 | gcgagtacac gctggtgcag aaccactgtg gcgggaaaga cagcacccag gactcctttc |
| 2881 | gtgttgtcac cgagaacgtc ccctgcggca ccacagggac cacctgctcc aaggccatca |
| 2941 | agattttcct ggggggcttc gagctgaagc taagccatgg gaaggtggag gtgatcggga |
| 3001 | cggacgagag ccaggaggtg ccatacacca tccggcagat gggcatctac ctggtggtgg |
| 3061 | acaccgacat tggcctggtg ctgctgtggg acaagaagac cagcatcttc atcaacctca |
| 3121 | gccccgagtt caagggcagg gtctgcggcc tgtgtgggaa cttcgacgac atcgccgtta |
| 3181 | atgactttgc cacgcggagc cggtctgtgg tgggggacgt gctggagttt gggaacagct |
| 3241 | ggaagctctc cccctcctgc ccagatgccc tggcgcccaa ggacccctgc acggccaacc |
| 3301 | ccttccgcaa gtcctgggcc cagaagcagt gcagcatcct ccacggcccc accttcgccg |
| 3361 | cctgccacgc acacgtggag ccggccaggt actacgaggc ctgcgtgaac gacgcgtgcg |
| 3421 | cctgcgactc cgggggtgac tgcgagtgct tctgcacggc tgtggccgcc tacgcccagg |
| 3481 | cctgccatga agtaggcctg tgtgtgtcct ggcggacccc gagcatctgc cctctgttct |
| 3541 | gcgactacta caaccccgaa ggccagtgcg agtggcacta ccagccctgc ggggtgccct |
| 3601 | gcctgcgcac ctgccggaac ccccgtggag actgcctgcg ggacgtccgg ggcctggaag |
| 3661 | gctgctaccc caagtgccca ccagaggctc ccatctttga tgaggacaag atgcagtgtg |
| 3721 | tggccacctg cccaaccccg cctctgccac cacggtgcca cgtccatggg aagtcctacc |
| 3781 | ggccaggtgc agtggtgccc tcggacaaga actgccagtc ctgcctttgt acggagcgcg |
| 3841 | gcgtggagtg cacctacaaa gctgaggcct gtgtctgcac ctacaatgga cagcgcttcc |
| 3901 | acccagggga cgtcatctac cacacgacgg atggcacggg tggctgcatc tccgcccgct |
| 3961 | gcggggccaa cggcaccatt gagaggaggg tctacccctg cagccccacc acccctgtcc |
| 4021 | ccccaaccac cttctccttc tccacacccc cgcttgtcgt gagctccacg cacaccccca |
| 4081 | gcaatggccc aagcagcgcg cacacaggcc ctccgagcag cgcctggccc accacagcag |
| 4141 | gcacttctcc caggacgagg ctgcccacag cctctgcctc actgccgccg gtctgtgggg |
| 4201 | aaaagtgcct gtggtcgcca tggatggatg tcagccgccc tggacggggc acggacagcg |
| 4261 | gtgacttcga cacactggag aacctccgcg cccatgggta ccgggtgtgc gaatcaccca |
| 4321 | ggtcggtgga gtgccgagct gaggacgccc ccggagtgcc gctccgagcc ctggggcagc |
| 4381 | gtgtgcagtg cagcccggat gtggggctga cctgtcgtaa cagggagcag gcatcggggc |
| 4441 | tctgctacaa ctaccagatc agggtccagt gctgcacgcc cctaccctgc tccacctcta |
| 4501 | gcagtccagc ccagaccact cctccaacta cctccaagac cactgaaacc cgggcctcag |
| 4561 | gctcctcagc tcccagcagc acacctggca ccgtgtctct ctctacagcc aggacgacac |
| 4621 | ctgccccagg taccgctacc tctgtcaaaa aaactttctc aactcccagc cctccgccag |
| 4681 | tgccggcaac atcaacatca tccatgtcga ccacggcccc ggggacctct gtggtctcca |
| 4741 | gcaagcccac ccccacggag cccagcacat cctcctgcct gcaggagctt tgcacctgga |
| 4801 | ccgagtggat cgatggcagc taccctgctc ctggaataaa tggtggagat tttgacacat |
| 4861 | ttcaaaattt gagagacgaa ggatacacat tctgtgaaag tcctcgaagc gtgcagtgcc |
| 4921 | gggcagagag cttccccaac acgccgctgg cagacctggg gcaggacgtc atctgcagcc |
| 4981 | acacagaggg gctgatttgc ctgaacaaga accagctccc acccatctgc tacaactatg |
| 5041 | agatccgcat ccagtgttgc gagacggtga acgtgtgcag agacatcacc agactgccaa |
| 5101 | agaccgtcgc aacgacacgg ccgactccac atccaaccgg agctcagacc cagaccacct |
| 5161 | tcaccacaca catgccctcg gcctccacag agcaacccac ggcaacctcc aggggtgggc |
| 5221 | ccacagcaac cagcgtcaca cagggcaccc acaccacact agtcaccaga aactgtcatc |
| 5281 | cccggtgcac ctggacaaag tggttcgacg tggacttccc gtcccccgga ccccatggtg |
| 5341 | gagacaagga aacctacaac aacatcatca ggagtgggga aaaaatctgc cgccgacctg |
| 5401 | aggagatcac caggctccag tgccgagcca agagccaccc agaggtgagc atcgaacacc |
| 5461 | tgggccaggt ggtgcagtgc agccgggaag agggcctggt gtgccggaac caggaccagc |
| 5521 | agggaccctt caagatgtgc ctcaactacg aggtgcgtgt gctctgctgc gagaccccca |
| 5581 | gaggctgcca catgacctcc acacctggct ccacctctag cagtccagcc cagaccactc |
| 5641 | cttcaacaac ctccaagacc actgaaaccc aggcctcagg ctcctcagcc cccagcagca |
| 5701 | cacctggcac cgtgtctctc tctacagcca ggacgacacc tgccccaggt accgctacct |
| 5761 | ctgtcaaaaa aactttctca actcccagcc ctccgccagt gccggcaaca tcaacatcat |
| 5821 | ccatgtcgac cacggccccg gggacctctg tggtctccag caagcccacc cccacggagc |
| 5881 | ccagcacatc ctcctgcctg caggagcttt gcacctggac cgagtggatt gatggcagct |
| 5941 | accctgctcc tggaataaat ggtggagatt ttgacacatt tcaaaatttg agagacgaag |
| 6001 | gatacacatt ctgtgaaagt cctcgaagcg tgcagtgccg ggcagagagc ttccccaaca |
| 6061 | cgccgctggc agacctgggg caggacgtca tctgcagcca cacagagggg ctgatttgcc |
| 6121 | tgaacaagaa ccagctccca cccatctgct acaactatga gatccgcatc cagtgttgcg |
| 6181 | agacggtgaa cgtgtgcaga gacatcacca gaccgccaaa gaccgtcgca acgacacggc |
| 6241 | cgactccaca tccaaccgga gctcagaccc agaccacctt caccacacac atgccctcgg |
| 6301 | cctccacaga gcaacccacg gcaacctcca ggggtgggcc cacagcaacc agcgtcacac |
| 6361 | agggcaccca caccacacca gtcaccagaa actgtcatcc ccggtgcacc tggacaacgt |
| 6421 | ggttcgacgt ggacttcccg tcccccggac cccatggtgg agacaaggaa acctacaaca |
| 6481 | acatcatcag gagtggggaa aaaatctgcc gccgacctga ggagatcacc aggctccagt |
| 6541 | gccgagccaa gagccaccca gaggtgagca tcgaacacct gggccaggtg gtgcagtgca |
| 6601 | gccgggaaga gggcctggtg tgccggaacc aggaccagca gggacccttc aagatgtgcc |
| 6661 | tcaactacga ggtgcgtgtg ctctgctgcg agacccccaa aggctgcccc gtgacctcca |
| 6721 | cacctgtgac agctcctagc acccctagtg ggagagccac cagcccaact cagagcacct |
| 6781 | cctcttggca gaaatccagg acaaccactt tggtgacaac cagcacaacc tccactccac |
| 6841 | agaccagtac aacctatgcc catacaacca gcacaacctc tgctcctaca gccagaacaa |
| 6901 | cctctgctcc tacaaccaga acaacctctg cctctccagc cagcacaacc tctggtcctg |
| 6961 | gaaatactcc cagccctgtt cctaccacca gcacaatctc tgctcctaca actagcataa |
| 7021 | cctctgcccc tacaaccagc acaacctctg cccctacaag cagcacaacc tctggtcctg |
| 7081 | gaactactcc cagccctgtt cctaccacca gcataacctc tgcccctaca accagcacaa |
| 7141 | cctctgctcc tacaaccagc acaacctctg cccgtacaag cagcacaacc tctgccacta |
| 7201 | ccaccagcag aatctctggt cctgaaacta ctcccagccc tgttcctacc accagcacaa |
| 7261 | cctctgccac tacaaccagc acaacctcag ctcctacaac cagcacaacc tctgccccta |
| 7321 | caagcagcac aacctccagt ccacagacca gcacaacctc ggctcctaca accagcacaa |
| 7381 | cttctggtcc tggaactacc ccaagccctg ttcccacgac cagcacaacc tctgccccta |
| 7441 | caacaagaac aacttctgct cctaaaagca gcacaacctc tgccgctaca accagcacaa |
| 7501 | cctctggtcc tgaaactact cctagacctg ttcctaccac cagcacaacc tcttctccta |
| 7561 | caaccagcac aacctctgct cctacaacca gcacaacctc tgcttctaca accagcacaa |
| 7621 | cctctggtgc tggaactact cccagccctg ttcccaccac cagcacaacc tctgctccta |
| 7681 | caaccagcac aacctctgcc cctataagca gcacaacctc tgccactaca accagcacaa |
| 7741 | cctctggtcc tggaactact cccagccctg ttcctaccac gagcacaacc tctgctccta |
| 7801 | caaccagcac aacctctggt cctggaacta ctcccagtgc tgttcccacc accagcataa |
| 7861 | cctctgcacc tacaaccagc acaaactctg cccctataag cagcacaacc tctgccacta |
| 7921 | caaccagcag aatctctggt cctgaaacta ctcccagccc tgttcctacc gccagcacaa |
| 7981 | cctctgcttc tacaactagc acaacctctg gtcctggaac tactcccagc cctgttccta |
| 8041 | ccaccagcac aatctctgtt cctaccacca gcacaacttc tgcttctaca accagcacaa |
| 8101 | cctctgcttc tacaaccagc acaacctctg gtcctggaac tactcccagc cctgttccca |
| 8161 | ccaccagcac aacctctgct cccacaacaa gcacaacctc tgcccctaca accagcacaa |
| 8221 | tctcggcccc aacaaccagc acaacctctg ccactacaac cagcacgacc tctgctccta |
| 8281 | cacccagaag aacctcagcc cctacaacca gcacaatctc tgcctctacc accagcacaa |
| 8341 | cctctgcgac tacaaccagc acaacctctg ctactacaac cagcacaatc tctgccccta |
| 8401 | caaccagcac aactttgtct cctacaacca gcacaacctc tactactata accagcacaa |
| 8461 | cttctgcccc tataagcagc acaacttcca caccacagac cagcacaact tcggctccta |
| 8521 | caaccagcac aacttctggt cctggaacta cttcaagccc tgttcccacc accagcacaa |
| 8581 | cctctgcccc tacaaccagc acaacctctg cccctacaac cagaacaacc tctgtcccta |
| 8641 | caagcagcac aacctccact gctacaacca gcacaacctc tggccctgga actactccca |
| 8701 | gccctgttcc caccaccagt acaacctctg ctcctacaac cagaacaacc tctgctccta |
| 8761 | caaccagcac aacctctgcc cctacaacca gcacaacctc tgcccctaca agcagcacaa |
| 8821 | cctcagctac tacaaccagc acaatctctg ttcctacaac cagcacaact tctgttcctg |
| 8881 | gaactactcc cagccctgtt cctaccacca gcacaatctc tgttcctacc accagcacaa |
| 8941 | cttctgcttc tacaaccagc acaacctctg gtcctggaac tactcccagc cctgttccca |
| 9001 | ccaccagcac aacctctgct cccacaacaa gcacaacctc tgcccctaca accagcacaa |
| 9061 | tctcggcccc aacaaccagc acaccctctg cccctacaac cagcacaacc ttagctccta |
| 9121 | caaccagcac aacctctgcc cctacaacca gcacaacctc tacccctaca agcagcacaa |
| 9181 | cctcctctcc acagaccagc acaacctcgg cttctaccac cagcataact tctggtcctg |
| 9241 | gaactacccc aagccctgtt cccaccacca gcacaacctc tgctcctaca accagcacaa |
| 9301 | cctctgccgc tacaaccagc acaatctcgg ccccaacaac cagcacaacg tctgctccta |
| 9361 | caaccagcac aacctctgcc tctacagcca gcaaaacctc tggtcttgga actactccca |
| 9421 | gccctattcc taccaccagc acaacctctc ctcctacaac cagcacaact tctgcctcta |
| 9481 | cagccagcaa aacctctggt cctggaacca ctcccagccc tgttcccacc accagcacaa |
| 9541 | tctttgctcc tagaaccagc accacttctg cctctacaac cagcacaacc cctggtcctg |
| 9601 | gaaccactcc cagccccgtt cccaccacca gcacagcctc tgtttcaaag accagcacaa |
| 9661 | gccatgtttc catatccaag acaacccact cccaaccagt caccagagac tgtcatctcc |
| 9721 | ggtgcacctg gaccaagtgg tttgacatag acttcccatc ccctggaccc cacggcgggg |
| 9781 | acaaggaaac ctacaacaac atcatcagga gtggggaaaa aatctgccgc cgacctgagg |
| 9841 | agatcaccag gctccagtgc cgagccgaga gccacccgga ggtgagcatt gaacacctgg |
| 9901 | gccaggtggt gcagtgcagc cgtgaagagg gcctggtgtg ccggaaccag gaccagcagg |
| 9961 | gacccttcaa gatgtgcctc aactacgagg tgcgtgtgct ctgctgcgag acccctaaag |
| 10021 | gttgccccgt gacctccaca cctgtgacag ctcctagcac ccctagtggg agagccacca |
| 10081 | gcccaactca gagcacttcc tcttggcaga aatccaggac aaccactttg gtgacaacca |
| 10141 | gcacaacctc cactccacag accagcacaa cctctgctcc tacaaccagc acaacctctg |
| 10201 | ctcccacaac cagcacaact tctgccccta caaccagcac aacctccact ccacagacca |
| 10261 | gcatatcctc tgcccctaca agcagcacaa cctcggctcc tacaagcagc acaatctctg |
| 10321 | ctcgtacaac cagcataatc tctgccccta caaccagcac aacctcttcc cctacaacca |
| 10381 | gcacaacctc tgctactaca accagcacaa cctctgcccc tacaagcagc acaacctcca |
| 10441 | ctccacagac cagcaaaacc tcagctgcta caagcagcac aacctccggt tctggaacta |
| 10501 | ctcccagccc tgttaccacc accagcacag cctctgtttc aaagaccagc acaagccatg |
| 10561 | tttctgtatc caagacaacc cactcccaac cagtcaccag agactgtcat ccccggtgca |
| 10621 | cctggaccaa atggtttgat gtggactttc catcccctgg accccacggt ggggacaagg |
| 10681 | aaacctacaa caacatcatc aggagtgggg aaaaaatctg ccgccgacct gaggagatca |
| 10741 | ccaggctcca gtgccgagcc aagagccacc cggaggtgag catcgaacac ctgggccagg |
| 10801 | tggtgcagtg cagccgcgaa gagggcctgg tgtgccggaa ccaggaccag cagggaccct |
| 10861 | tcaagatgtg cctcaactac gaggtgcgtg tgctttgctg cgagaccccc aaaggctgcc |
| 10921 | ccgtgacctc cacatctgtg acagctccta gcacccctag tgggagagcc accagcccaa |
| 10981 | ctcagagcac ctcctcttgg cagaaatcca ggacaaccac tttggtgaca agcagcataa |
| 11041 | cctccactac acagaccagc acaacctctg cccctacaac tagcacaacc cctgcttcta |
| 11101 | tacccagcac aacctctgcc ccaacaacca gcacaacctc tgctcccaca acgagcacaa |
| 11161 | cttctgcccc tacaaccagc acaacctcca ctccacagac caccacatcc tctgccccta |
| 11221 | caagcagcac aacctcggct cctaccacca gcacaatctc tgcccctaca accagcacaa |
| 11281 | tctctgcccc tacaaccagc acaacctctg ctcccacagc cagcacaacg tcagctccta |
| 11341 | cgagcacttc ctcggctcct acaaccaaca caacctctgc ccctacaact agcactacct |
| 11401 | ctgctcccat aaccagcaca atctctgccc ctacaaccag cacaacctcc actccacaga |
| 11461 | ccagcacaat ctcttcccct acaaccagca caacctccac tccgcagacc agcacaacct |
| 11521 | cttcccctac aactagcaca acctcagctc ctacaaccag cacaacttct gcccctacaa |
| 11581 | ccagcacaac ctccactcca cagaccagca tatcctctgc ccctacaagc agcacaacct |
| 11641 | ctgctcctac agccagcaca atctctgccc ctacaaccag cacaacctct ttccatacaa |
| 11701 | ccagcacaac ctctccccct acaagcagca caagctccac tccacagacc agcaaaacct |
| 11761 | cagctgctac aagcagcaca acctccggtt ctggaactac tcccagcccc gttcccacca |
| 11821 | ccagcacagc ctctgtttca aagaccagca caagccatgt ttctgtatcc aagacaaccc |
| 11881 | actcccaacc agtcaccaga gactgtcatc cccggtgcac ctggaccaag tggtttgacg |
| 11941 | tggactttcc atcccctgga ccccacggtg gggacaagga aacctacaac aacatcatca |
| 12001 | ggagtgggga aaaaatctgc cgccgacctg aggagatcac caggctccag tgccgagccg |
| 12061 | agagccaccc ggaggtgagc atcgaacacc tgggccaggt ggtgcagtgc agccgggaag |
| 12121 | agggcctggt gtgccggaac caggaccagc agggaccctt caagatgtgc ctcaactacg |
| 12181 | aggtgcgtgt gctctgctgc gagaccccca aaggctgccc cgtgacctcc acacctgtga |
| 12241 | cagctcctag cacccctagt gggagagcca ccagcccaac tcagagcact tcctcttggc |
| 12301 | agaaatccag gacaaccact ttggtgacaa ccagcacaac ctccactcca cagaccagca |
| 12361 | caacctctgc ccctacaacc agcacaatcc ctgcttctac acccagcaca acctctgccc |
| 12421 | ctacaaccag cacaacctct gcccctacaa ccagcacgac ctcagctcct acacacagaa |
| 12481 | cgacttctgg tcctacaacc agcacaacct tggctcctac aaccagcaca acctctgctc |
| 12541 | caacaaccag cacaaactct gctcctacaa ccagcacaat ctctgcctct acaaccagca |
| 12601 | caatctctgc ccctacaacc agcacaatct cttcccctac aagcagcaca acctccactc |
| 12661 | cacagaccag caaaacctca gctgctacaa gcagcacaac ctccggttct ggaactactc |
| 12721 | caagccctgt tcccaccacc agcacaacct ctgcctctac aaccagcaca acttctgctc |
| 12781 | ctacaaccag cacaacctct ggtcctggaa ctactccaag ccctgttccc agcaccagta |
| 12841 | caacctctgc tgctacaacc agcacaacct ctgctcctac aaccagaaca acatctgctc |
| 12901 | ctacaagcag catgacctct ggtcctggaa ctactcccag ccctgttccc accaccagca |
| 12961 | caacctctgc tcctacaact agcacaacct ctggtcctgg aactactccc agccctgttc |
| 13021 | ccaccaccag cacaacctct gctcctataa ccagcacaac ctctggtcct ggaagtactc |
| 13081 | ccagccctgt tcccaccacc agcacaacct ctgctcctac aaccagcaca acctctgcct |
| 13141 | ctacagccag cacaacctct ggtcctggaa ctactcccag ccctgttccc accaccagca |
| 13201 | caacctctgc tcctacaacc agaacaacct ctgcctctac agccagcaca acctctggtc |
| 13261 | ctggaagtac tcccagccct gttcccacca ccagcacaac ctctgctcct acaaccagaa |
| 13321 | caacccctgc ctctacagcc agcacaacct ctggtcctgg aactactccc agccctgttc |
| 13381 | ccaccacaag cacaacctct gcttctacaa ccagcacaat ctctctccct acaaccagca |
| 13441 | caacctctgc tcctataacc agcatgacct ctggtcctgg aactactccc agccctgttc |
| 13501 | ccaccaccag cacaacctct gctcctacaa ccagcacaac ctctgcctct acagccagca |
| 13561 | caacctctgg tcctggaact actcccagcc ctgttcccac caccagcaca acctctgctc |
| 13621 | ctacaaccag cacaacctct gcctctacag ccagcacaac ctctggtcct ggaacttctc |
| 13681 | tcagccctgt tcccaccacg agcacaacct ctgctcctac aactagcaca acctctggtc |
| 13741 | ctggaactac tcccagccct gttcccacca ccagcacaac ctctgctcct acaaccagca |
| 13801 | cgacctctgg tcctggaact actcccagcc ccgttcccac caccagcaca acccctgttt |
| 13861 | caaagaccag cacaagccat ctttctgtat ccaagacaac ccactcccaa ccagtcacca |
| 13921 | gtgactgtca tcctctgtgc gcctggacaa agtggttcga cgtggacttc ccatcccctg |
| 13981 | gaccccacgg cggggacaag gaaacctaca acaacatcat caggagtggg gaaaaaatct |
| 14041 | gccgccgacc tgaggagatc accaggctcc agtgccgagc cgagagccac ccggaggtga |
| 14101 | acattgaaca cctgggtcag gtggtgcagt gcagccgtga agagggcctg gtgtgccgga |
| 14161 | accaggacca gcagggaccc ttcaagatgt gcctcaacta cgaggtgcgc gtgctctgct |
| 14221 | gcgagacccc cagaggctgc ccggtgacct ctgtgacccc atatgggact tctcctacca |
| 14281 | atgctctgta tccttccctg tctacttcca tggtatccgc ctccgtggca tccacctctg |
| 14341 | tggcatccag ctctgtggca tccagctctg tggcttactc cacccaaacc tgcttctgca |
| 14401 | acgtggctga ccggctctac cctgcaggat ccaccatata ccgccacaga gacctcgctg |
| 14461 | gccattgcta ttatgccctg tgtagccagg actgccaagt ggtcagaggg gttgacagtg |
| 14521 | actgtccgtc caccacgctg cctcctgccc cagccacgtc cccttcaata tccacctccg |
| 14581 | agcccgtcac tgagctggga tgcccaaatg cggttccccc cagaaagaaa ggtgagacct |
| 14641 | gggccacacc caactgctcc gaggccacct gtgagggcaa caacgtcatc tccctgcgcc |
| 14701 | cgcgcacgtg cccgagggtg gagaagccca cttgtgccaa cggctacccg gctgtgaagg |
| 14761 | tggctgacca agatggctgc tgccatcact accagtgcca gtgtgtgtgc agcggctggg |
| 14821 | gtgaccccca ctacatcacc ttcgacggca cctactacac cttcctggac aactgcacgt |
| 14881 | acgtgctggt gcagcagatt gtgcccgtgt atggccactt ccgcgtgctc gtcgacaact |
| 14941 | acttctgcgg tgcggaggac gggctctcct gcccgaggtc catcatcctg gagtaccacc |
| 15001 | aggaccgcgt ggtgctgacc cgcaagccag tccacggggt gatgacaaac gagatcatct |
| 15061 | tcaacaacaa ggtggtcagc cccggcttcc ggaaaaacgg catcgtggtc tcgcgcatcg |
| 15121 | gcgtcaagat gtacgcgacc atcccggagc tgggagtcca ggtcatgttc tccggcctca |
| 15181 | tcttctccgt ggaggtgccc ttcagcaagt ttgccaacaa caccgagggc cagtgcggca |
| 15241 | cttgcaccaa cgacaggaag gatgagtgcc gcacgcctag ggggacggtg gtcgcttcct |
| 15301 | gctccgagat gtccggcctc tggaacgtga gcatacccga ccagccagcc tgccaccggc |
| 15361 | ctcacccgac gcccaccacg gtcgggccca ccacagttgg gtctaccacg gtcgggccca |
| 15421 | ccacagttgg gtctaccacg gtcgggccca ccacaccgcc tgctccgtgc ctgccatcac |
| 15481 | ccatctgcca gctgattctg agcaaggtct ttgagccgtg ccacactgtg atccccccac |
| 15541 | tgctgttcta tgagggctgc gtctttgacc ggtgccacat gacggacctg gatgtggtgt |
| 15601 | gctccagcct ggagctgtac gcggcactct gtgcgtccca cgacatctgc atcgattgga |
| 15661 | gaggccggac cggccacatg tgcccattca cctgcccagc cgacaaggtg taccagccct |
| 15721 | gcggcccgag caacccctcc tactgctacg ggaatgacag cgccagcctc ggggctctgc |
| 15781 | cggaggccgg ccccatcacc gaaggctgct tctgtccgga gggcatgacc ctcttcagca |
| 15841 | ccagtgccca agtctgcgtg cccacgggct gccccaggtg tctggggccc cacggagagc |
| 15901 | cggtgaaggt gggccacacc gtcggcatgg actgccagga gtgcacgtgt gaggcggcca |
| 15961 | cgtggacgct gacctgccga cccaagctct gcccgctgcc ccctgcctgc cccctgcccg |
| 16021 | gcttcgtgcc tgtgcctgca gccccacagg ccggccagtg ctgcccccag tacagctgcg |
| 16081 | cctgcaacac cagccgctgc cccgcgcccg tgggctgtcc tgagggcgcc cgcgcgatcc |
| 16141 | cgacctacca ggagggggcc tgctgcccag tccaaaactg cagctggaca gtgtgcagca |
| 16201 | tcaacgggac cctgtaccag cccggcgccg tggtctcctc gagcctgtgc gaaacctgca |
| 16261 | ggtgtgagct gccgggtggc cccccatcgg acgcgtttgt ggtcagctgt gagacccaga |
| 16321 | tctgcaacac acactgccct gtgggcttcg agtaccagga gcagagcggg cagtgctgtg |
| 16381 | gcacctgtgt gcaggtcgcc tgtgtcacca acaccagcaa gagccccgcc cacctcttct |
| 16441 | accccggcga gacctggtca gacgcaggga accactgtgt gacccaccag tgtgagaagc |
| 16501 | accaggatgg gctcgtggtg gtcaccacga agaaggcgtg ccccccgctc agctgttctc |
| 16561 | tggacgaggc ccgcatgagc aaggacggct gctgccgctt ctgcccgccg cccccgcccc |
| 16621 | cgtaccagaa ccagtcgacc tgtgctgtgt accataggag cctgatcatc cagcagcagg |
| 16681 | gctgcagctc ctcggagccc gtgcgcctgg cttactgccg ggggaactgt ggggacagct |
| 16741 | cttccatgta ctcgctcgag ggcaacacgg tggagcacag gtgccagtgc tgccaggagc |
| 16801 | tgcggacctc gctgaggaat gtgaccctgc actgcaccga cggctccagc cgggccttca |
| 16861 | gctacaccga ggtggaagag tgcggctgca tgggccggcg gtgccctgcg ccgggcgaca |
| 16921 | cccagcactc ggaggaggcg gaacccgagc ccagccagga ggcagagagt gggagctggg |
| 16981 | agagaggcgt cccagtgtcc cccatgcact gaccagcact gccgccctcc tgacctccaa |
| 17041 | ggagaacctc ccatatgtcc tctgagctcg gcttccaagg ccagtggaac ttgtgcccct |
| 17101 | gtccaggcgg ctgcagcttt gaacacactg tccacgcccg ctttcttgtg gagggtgtgg |
| 17161 | gctatgggtc acctgctgcc tggaggaggg gcccttaccc accccgcctg cagccacctc |
| 17221 | tcaggaccag ccccggggct ggccgagctc ctctggccat gcatccagcc tgctgttctg |
| 17281 | gggacgtgag catcacctga gggtctcagg aatgacgctt ggacatggtg atcagctgcc |
| 17341 | tggtggctgc aggaggaaga acctcactcc tacctcagcc ctcagcctgc gctcccctcc |
| 17401 | tcagtacacg gccaatctgt tgcataaata cacttgagca ttttgcaa |

[0117] In some embodiments, a MUC5AC RNAi agent includes an antisense strand wherein position 19 of the antisense strand (5′43′) is capable of forming a base pair with position 1 of a 19-mer target sequence disclosed in Table 1. In some embodiments, a MUC5AC agent includes an antisense strand wherein position 1 of the antisense strand (5′43′) is capable of forming a base pair with position 19 of a 19-mer target sequence disclosed in Table 1.

[0118] In some embodiments, a MUC5AC agent includes an antisense strand wherein position 2 of the antisense strand (5′→3′) is capable of forming a base pair with position 18 of a 19-mer target sequence disclosed in Table 1. In some embodiments, a MUC5AC agent includes an antisense strand wherein positions 2 through 18 of the antisense strand (5′ 4 3′) are capable of forming base pairs with each of the respective complementary bases located at positions 18 through 2 of the 19-mer target sequence disclosed in Table 1.

[0119] For the RNAi agents disclosed herein, the nucleotide at position 1 of the antisense strand (from 5′ end→3′ end) can be perfectly complementary to a MUC5AC gene, or can be non-complementary to a MUC5AC gene. In some embodiments, the nucleotide at position 1 of the antisense strand (from 5′ end→3′ end) is a U, A, or dT. In some embodiments, the nucleotide at position 1 of the antisense strand (from 5′ end→3′ end) forms an A:U or U:A base pair with the sense strand.

[0120] In some embodiments, a MUC5AC RNAi agent antisense strand comprises the sequence of nucleotides (from 5′ end→3′ end) 2-18 or 2-19 of any of the antisense strand sequences in Table 2, Table 3, or Table 11. In some embodiments, a MUC5AC RNAi sense strand comprises the sequence of nucleotides (from 5′ end→3′ end) 1-17, 1-18, or 2-18 of any of the sense strand sequences in Table 2, Table 4, Table 5, Table 6, or Table 7.

[0121] In some embodiments, a MUC5AC RNAi agent is comprised of (i) an antisense strand comprising the sequence of nucleotides (from 5′ end→3′ end) 1-18, 1-19, or 2-19 of any of the antisense strand sequences in Table 2 or Table 3, and (ii) a sense strand comprising the sequence of nucleotides (from 5′ end→3′ end) 2-19, 1-19, 1-18, or 2-18 of any of the sense strand sequences in Table 2, Table 4, Table 5, Table 6, or Table 7.

[0122] In some embodiments, the MUC5AC RNAi agents include core 19-mer nucleotide sequences shown in the following Table 2.

TABLE 2
MUC5AC RNAi Agent Antisense Strand and Sense Strand Core Stretch Base Sequences
(N = any nucleobase; I = inosine (hypoxanthine nucleobase)

| | | | | Corresponding | |
|---|---|---|---|---|---|
| | Antisense Strand Base | | Sense Strand Base | Positions of | |
| SEQ | Sequence (5′→3′) | SEQ | Sequence (5′→3′) | Identified | Targeted |
| ID | (Shown as an Unmodified | ID | (Shown as an Unmodified | Sequence on | Gene |
| NO:. | Nucleotide Sequence) | NO:. | Nucleotide Sequence) | SEQ ID NO: 1 | Position |
| 79 | UUGUAGUAGUCGCAGAACA | 568 | UGUUCUGCGACUACUACAA | 3535-3553 | 3535 |
| 80 | NUGUAGUAGUCGCAGAACA | 569 | UGUUCUGCGACUACUACAN | 3535-3553 | 3535 |
| 81 | UUGUAGUAGUCGCAGAACN | 570 | NGUUCUGCGACUACUACAA | 3535-3553 | 3535 |
| 82 | NUGUAGUAGUCGCAGAACN | 571 | NGUUCUGCGACUACUACAN | 3535-3553 | 3535 |
| 83 | UUCUUGUUCAGGCAAAUCA | 572 | UGAUUUGCCUGAACAAGAA | 4993-5011 | 4993 |
| 84 | NUCUUGUUCAGGCAAAUCA | 573 | UGAUUUGCCUGAACAAGAN | 4993-5011 | 4993 |
| 85 | UUCUUGUUCAGGCAAAUCN | 574 | NGAUUUGCCUGAACAAGAA | 4993-5011 | 4993 |
| 86 | NUCUUGUUCAGGCAAAUCN | 575 | NGAUUUGCCUGAACAAGAN | 4993-5011 | 4993 |
| 87 | CUUGAUGGCCUUGGAGCAG | 576 | CUGCUCCAAGGCCAUCAAG | 2924-2942 | 2924 |
| 88 | UUUGAUGGCCUUGGAGCAG | 577 | CUGCUCCAAGGCCAUCAAA | 2924-2942 | 2924 |
| 89 | NUUGAUGGCCUUGGAGCAG | 578 | CUGCUCCAAGGCCAUCAAN | 2924-2942 | 2924 |
| 90 | UUUGAUGGCCUUGGAGCAN | 579 | NUGCUCCAAGGCCAUCAAA | 2924-2942 | 2924 |
| 91 | NUUGAUGGCCUUGGAGCAN | 580 | NUGCUCCAAGGCCAUCAAN | 2924-2942 | 2924 |
| 92 | AAUCUUGAUGGCCUUGGAG | 581 | CUCCAAGGCCAUCAAGAUU | 2927-2945 | 2927 |
| 93 | AAUCUUGAUGGCCUUGGAN | 582 | NUCCAAGGCCAUCAAGAUU | 2927-2945 | 2927 |
| 94 | UAUCUUGAUGGCCUUGGAG | 583 | CUCCAAGGCCAUCAAGAUA | 2927-2945 | 2927 |
| 95 | UAUCUUGAUGGCCUUGGAN | 584 | NUCCAAGGCCAUCAAGAUA | 2927-2945 | 2927 |
| 96 | NAUCUUGAUGGCCUUGGAG | 585 | CUCCAAGGCCAUCAAGAUN | 2927-2945 | 2927 |
| 97 | NAUCUUGAUGGCCUUGGAN | 586 | NUCCAAGGCCAUCAAGAUN | 2927-2945 | 2927 |
| 98 | CUUGAACUCGGGGCUGAGG | 587 | CCUCAGCCCCGAGUUCAAG | 3116-3134 | 3116 |
| 99 | UUUGAACUCGGGGCUGAGG | 588 | CCUCAGCCCCGAGUUCAAA | 3116-3134 | 3116 |
| 100 | NUUGAACUCGGGGCUGAGG | 589 | CCUCAGCCCCGAGUUCAAN | 3116-3134 | 3116 |
| 101 | UUUGAACUCGGGGCUGAGN | 590 | NCUCAGCCCCGAGUUCAAA | 3116-3134 | 3116 |
| 102 | NUUGAACUCGGGGCUGAGN | 591 | NCUCAGCCCCGAGUUCAAN | 3116-3134 | 3116 |
| 103 | GGAUGCUGCACUGCUUCUG | 592 | CAGAAGCAGUGCAGCAUCC | 3321-3339 | 3321 |
| 104 | UGAUGCUGCACUGCUUCUG | 593 | CAGAAGCAGUGCAGCAUCA | 3321-3339 | 3321 |
| 105 | NGAUGCUGCACUGCUUCUG | 594 | CAGAAGCAGUGCAGCAUCN | 3321-3339 | 3321 |
| 106 | UGAUGCUGCACUGCUUCUN | 595 | NAGAAGCAGUGCAGCAUCA | 3321-3339 | 3321 |
| 107 | NGAUGCUGCACUGCUUCUN | 596 | NAGAAGCAGUGCAGCAUCN | 3321-3339 | 3321 |
| 108 | UGAUGCUGCACUGCUUCUG | 597 | CAGAAGCAGUGCAICAUCA | 3321-3339 | 3321 |
| 109 | UGAUGCUGCACUGCUUCUN | 598 | NAGAAGCAGUGCAICAUCA | 3321-3339 | 3321 |
| 110 | NGAUGCUGCACUGCUUCUG | 599 | CAGAAGCAGUGCAICAUCN | 3321-3339 | 3321 |
| 111 | NGAUGCUGCACUGCUUCUN | 600 | NAGAAGCAGUGCAICAUCN | 3321-3339 | 3321 |
| 112 | GUAGUCGCAGAACAGAGGG | 601 | CCCUCUGUUCUGCGACUAC | 3530-3548 | 3530 |
| 113 | UUAGUCGCAGAACAGAGGG | 602 | CCCUCUGUUCUGCGACUAA | 3530-3548 | 3530 |
| 114 | UUAGUCGCAGAACAGAGGN | 603 | NCCUCUGUUCUGCGACUAA | 3530-3548 | 3530 |
| 115 | NUAGUCGCAGAACAGAGGG | 604 | CCCUCUGUUCUGCGACUAN | 3530-3548 | 3530 |
| 116 | NUAGUCGCAGAACAGAGGN | 605 | NCCUCUGUUCUGCGACUAN | 3530-3548 | 3530 |
| 117 | UUAGUCGCAGAACAGAGGG | 606 | CCCUCUGUUCUGCIACUAA | 3530-3548 | 3530 |
| 118 | UUAGUCGCAGAACAGAGGN | 607 | NCCUCUGUUCUGCIACUAA | 3530-3548 | 3530 |
| 119 | NUAGUCGCAGAACAGAGGG | 608 | CCCUCUGUUCUGCIACUAN | 3530-3548 | 3530 |
| 120 | NUAGUCGCAGAACAGAGGN | 609 | NCCUCUGUUCUGCIACUAN | 3530-3548 | 3530 |
| 121 | AGUAGUCGCAGAACAGAGG | 610 | CCUCUGUUCUGCGACUACU | 3531-3549 | 3531 |
| 122 | AGUAGUCGCAGAACAGAGN | 611 | NCUCUGUUCUGCGACUACU | 3531-3549 | 3531 |
| 123 | UGUAGUCGCAGAACAGAGG | 612 | CCUCUGUUCUGCGACUACA | 3531-3549 | 3531 |
| 124 | UGUAGUCGCAGAACAGAGN | 613 | NCUCUGUUCUGCGACUACA | 3531-3549 | 3531 |
| 125 | NGUAGUCGCAGAACAGAGG | 614 | CCUCUGUUCUGCGACUACN | 3531-3549 | 3531 |
| 126 | NGUAGUCGCAGAACAGAGN | 615 | NCUCUGUUCUGCGACUACN | 3531-3549 | 3531 |
| 127 | AGUAGUCGCAGAACAGAGG | 616 | CCUCUGUUCUICGACUACU | 3531-3549 | 3531 |
| 128 | AGUAGUCGCAGAACAGAGN | 617 | NCUCUGUUCUICGACUACU | 3531-3549 | 3531 |
| 129 | UGUAGUCGCAGAACAGAGG | 618 | CCUCUGUUCUICGACUACA | 3531-3549 | 3531 |
| 130 | UGUAGUCGCAGAACAGAGN | 619 | NCUCUGUUCUICGACUACA | 3531-3549 | 3531 |
| 131 | NGUAGUCGCAGAACAGAGG | 620 | CCUCUGUUCUICGACUACN | 3531-3549 | 3531 |
| 132 | NGUAGUCGCAGAACAGAGN | 621 | NCUCUGUUCUICGACUACN | 3531-3549 | 3531 |
| 133 | GUAGUAGUCGCAGAACAGA | 622 | UCUGUUCUGCGACUACUAC | 3533-3551 | 3533 |
| 134 | UUAGUAGUCGCAGAACAGA | 623 | UCUGUUCUGCGACUACUAA | 3533-3551 | 3533 |
| 135 | NUAGUAGUCGCAGAACAGA | 624 | UCUGUUCUGCGACUACUAN | 3533-3551 | 3533 |
| 136 | NUAGUAGUCGCAGAACAGN | 625 | NCUGUUCUGCGACUACUAN | 3533-3551 | 3533 |
| 137 | UGUAGUAGUCGCAGAACAG | 626 | CUGUUCUGCGACUACUACA | 3534-3552 | 3534 |
| 138 | NGUAGUAGUCGCAGAACAG | 627 | CUGUUCUGCGACUACUACN | 3534-3552 | 3534 |
| 139 | NGUAGUAGUCGCAGAACAN | 628 | NUGUUCUGCGACUACUACN | 3534-3552 | 3534 |
| 140 | AUAGUUGUAGCAGAUGGGU | 629 | ACCCAUCUGCUACAACUAU | 5021-5039 | 5021 |
| 141 | AUAGUUGUAGCAGAUGGGN | 630 | NCCCAUCUGCUACAACUAU | 5021-5039 | 5021 |
| 142 | UUAGUUGUAGCAGAUGGGU | 631 | ACCCAUCUGCUACAACUAA | 5021-5039 | 5021 |
| 143 | UUAGUUGUAGCAGAUGGGN | 632 | NCCCAUCUGCUACAACUAA | 5021-5039 | 5021 |
| 144 | NUAGUUGUAGCAGAUGGGU | 633 | ACCCAUCUGCUACAACUAN | 5021-5039 | 5021 |
| 145 | NUAGUUGUAGCAGAUGGGN | 634 | NCCCAUCUGCUACAACUAN | 5021-5039 | 5021 |
| 146 | GUCCACGUCGAACCACUUU | 635 | AAAGUGGUUCGACGUGGAC | 5297-5315 | 5297 |
| 147 | UUCCACGUCGAACCACUUU | 636 | AAAGUGGUUCGACGUGGAA | 5297-5315 | 5297 |
| 148 | UUCCACGUCGAACCACUUN | 637 | NAAGUGGUUCGACGUGGAA | 5297-5315 | 5297 |
| 149 | NUCCACGUCGAACCACUUU | 638 | AAAGUGGUUCGACGUGGAN | 5297-5315 | 5297 |
| 150 | NUCCACGUCGAACCACUUN | 639 | NAAGUGGUUCGACGUGGAN | 5297-5315 | 5297 |
| 151 | UUCCACGUCGAACCACUUU | 640 | AAAGUGGUUCGACIUGGAA | 5297-5315 | 5297 |
| 152 | UUCCACGUCGAACCACUUN | 641 | NAAGUGGUUCGACIUGGAA | 5297-5315 | 5297 |
| 153 | NUCCACGUCGAACCACUUU | 642 | AAAGUGGUUCGACIUGGAN | 5297-5315 | 5297 |
| 154 | NUCCACGUCGAACCACUUN | 643 | NAAGUGGUUCGACIUGGAN | 5297-5315 | 5297 |
| 155 | GAAGUCCACGUCGAACCAC | 644 | GUGGUUCGACGUGGACUUC | 5300-5318 | 5300 |
| 156 | UAAGUCCACGUCGAACCAC | 645 | GUGGUUCGACGUGGACUUA | 5300-5318 | 5300 |
| 157 | UAAGUCCACGUCGAACCAN | 646 | NUGGUUCGACGUGGACUUA | 5300-5318 | 5300 |
| 158 | NAAGUCCACGUCGAACCAC | 647 | GUGGUUCGACGUGGACUUN | 5300-5318 | 5300 |
| 159 | NAAGUCCACGUCGAACCAN | 648 | NUGGUUCGACGUGGACUUN | 5300-5318 | 5300 |
| 160 | UAAGUCCACGUCGAACCAC | 649 | GUGGUUCGACGUGIACUUA | 5300-5318 | 5300 |
| 161 | UAAGUCCACGUCGAACCAN | 650 | NUGGUUCGACGUGIACUUA | 5300-5318 | 5300 |
| 162 | NAAGUCCACGUCGAACCAC | 651 | GUGGUUCGACGUGIACUUN | 5300-5318 | 5300 |
| 163 | NAAGUCCACGUCGAACCAN | 652 | NUGGUUCGACGUGIACUUN | 5300-5318 | 5300 |
| 164 | GGGAAGUCCACGUCGAACC | 653 | GGUUCGACGUGGACUUCCC | 5302-5320 | 5302 |
| 165 | UGGAAGUCCACGUCGAACC | 654 | GGUUCGACGUGGACUUCCA | 5302-5320 | 5302 |
| 166 | UGGAAGUCCACGUCGAACN | 655 | NGUUCGACGUGGACUUCCA | 5302-5320 | 5302 |
| 167 | NGGAAGUCCACGUCGAACC | 656 | GGUUCGACGUGGACUUCCN | 5302-5320 | 5302 |
| 168 | NGGAAGUCCACGUCGAACN | 657 | NGUUCGACGUGGACUUCCN | 5302-5320 | 5302 |
| 169 | UGGAAGUCCACGUCGAACC | 658 | GGUUCGACGUGIACUUCCA | 5302-5320 | 5302 |
| 170 | UGGAAGUCCACGUCGAACN | 659 | NGUUCGACGUGIACUUCCA | 5302-5320 | 5302 |
| 171 | NGGAAGUCCACGUCGAACC | 660 | GGUUCGACGUGIACUUCCN | 5302-5320 | 5302 |
| 172 | NGGAAGUCCACGUCGAACN | 661 | NGUUCGACGUGIACUUCCN | 5302-5320 | 5302 |
| 173 | AGAUGCUGGUCUUCUUGUC | 662 | GACAAGAAGACCAGCAUCU | 3090-3108 | 3090 |
| 174 | AGAUGCUGGUCUUCUUGUN | 663 | NACAAGAAGACCAGCAUCU | 3090-3108 | 3090 |
| 175 | UGAUGCUGGUCUUCUUGUC | 664 | GACAAGAAGACCAGCAUCA | 3090-3108 | 3090 |
| 176 | UGAUGCUGGUCUUCUUGUN | 665 | NACAAGAAGACCAGCAUCA | 3090-3108 | 3090 |
| 177 | NGAUGCUGGUCUUCUUGUC | 666 | GACAAGAAGACCAGCAUCN | 3090-3108 | 3090 |
| 178 | NGAUGCUGGUCUUCUUGUN | 667 | NACAAGAAGACCAGCAUCN | 3090-3108 | 3090 |
| 179 | AGAUGCUGGUCUUCUUGUC | 668 | GACAAGAAGACCAICAUCU | 3090-3108 | 3090 |
| 180 | AGAUGCUGGUCUUCUUGUN | 669 | NACAAGAAGACCAICAUCU | 3090-3108 | 3090 |
| 181 | UGAUGCUGGUCUUCUUGUC | 670 | GACAAGAAGACCAICAUCA | 3090-3108 | 3090 |
| 182 | UGAUGCUGGUCUUCUUGUN | 671 | NACAAGAAGACCAICAUCA | 3090-3108 | 3090 |
| 183 | NGAUGCUGGUCUUCUUGUC | 672 | GACAAGAAGACCAICAUCN | 3090-3108 | 3090 |
| 184 | NGAUGCUGGUCUUCUUGUN | 673 | NACAAGAAGACCAICAUCN | 3090-3108 | 3090 |
| 185 | GGUUGAUGAAGAUGCUGGU | 674 | ACCAGCAUCUUCAUCAACC | 3099-3117 | 3099 |
| 186 | UGUUGAUGAAGAUGCUGGN | 675 | NCCAGCAUCUUCAUCAACC | 3099-3117 | 3099 |
| 187 | NGUUGAUGAAGAUGCUGGU | 676 | ACCAGCAUCUUCAUCAACN | 3099-3117 | 3099 |
| 188 | NGUUGAUGAAGAUGCUGGN | 677 | NCCAGCAUCUUCAUCAACN | 3099-3117 | 3099 |
| 189 | AUGUUGUUGUAGGUUUCCU | 678 | AGGAAACCUACAACAACAU | 5347-5365 | 5347 |
| 190 | AUGUUGUUGUAGGUUUCCN | 679 | NGGAAACCUACAACAACAU | 5347-5365 | 5347 |
| 191 | UUGUUGUUGUAGGUUUCCU | 680 | AGGAAACCUACAACAACAA | 5347-5365 | 5347 |
| 192 | UUGUUGUUGUAGGUUUCCN | 681 | NGGAAACCUACAACAACAA | 5347-5365 | 5347 |
| 193 | NUGUUGUUGUAGGUUUCCN | 682 | NGGAAACCUACAACAACAN | 5347-5365 | 5347 |
| 194 | AUGAUGUUGUUGUAGGUUU | 683 | AAACCUACAACAACAUCAU | 5350-5368 | 5350 |
| 195 | AUGAUGUUGUUGUAGGUUN | 684 | NAACCUACAACAACAUCAU | 5350-5368 | 5350 |
| 196 | UUGAUGUUGUUGUAGGUUU | 685 | AAACCUACAACAACAUCAA | 5350-5368 | 5350 |
| 197 | UUGAUGUUGUUGUAGGUUN | 686 | NAACCUACAACAACAUCAA | 5350-5368 | 5350 |
| 198 | NUGAUGUUGUUGUAGGUUN | 687 | NAACCUACAACAACAUCAN | 5350-5368 | 5350 |
| 199 | UUGAUGAAGAUGCUGGUCU | 688 | AGACCAGCAUCUUCAUCAA | 3097-3115 | 3097 |
| 200 | UUGAUGAAGAUGCUGGUCN | 689 | NGACCAGCAUCUUCAUCAA | 3097-3115 | 3097 |
| 201 | NUGAUGAAGAUGCUGGUCU | 690 | AGACCAGCAUCUUCAUCAN | 3097-3115 | 3097 |
| 202 | NUGAUGAAGAUGCUGGUCN | 691 | NGACCAGCAUCUUCAUCAN | 3097-3115 | 3097 |
| 203 | UGAUCUGGUAGUUGUAGCA | 692 | UGCUACAACUACCAGAUCA | 4443-4461 | 4443 |
| 204 | UGAUCUGGUAGUUGUAGCN | 693 | NGCUACAACUACCAGAUCA | 4443-4461 | 4443 |
| 205 | NGAUCUGGUAGUUGUAGCA | 694 | UGCUACAACUACCAGAUCN | 4443-4461 | 4443 |
| 206 | NGAUCUGGUAGUUGUAGCN | 695 | NGCUACAACUACCAGAUCN | 4443-4461 | 4443 |
| 207 | UGAUCUGGUAGUUGUAGCN | 696 | NGCUACAACUACCAIAUCA | 4443-4461 | 4443 |
| 208 | NGAUCUGGUAGUUGUAGCA | 697 | UGCUACAACUACCAIAUCN | 4443-4461 | 4443 |
| 209 | NGAUCUGGUAGUUGUAGCN | 698 | NGCUACAACUACCAIAUCN | 4443-4461 | 4443 |
| 210 | UGAUCUGGUAGUUGUAGCN | 699 | NGCUACAACUACCAIAUCA | 4443-4461 | 4443 |
| 211 | CCCUGAUCUGGUAGUUGUA | 700 | UACAACUACCAGAUCAGGG | 4446-4464 | 4446 |
| 212 | UCCUGAUCUGGUAGUUGUA | 701 | UACAACUACCAGAUCAGGA | 4446-4464 | 4446 |
| 213 | NCCUGAUCUGGUAGUUGUA | 702 | UACAACUACCAGAUCAGGN | 4446-4464 | 4446 |
| 214 | UCCUGAUCUGGUAGUUGUN | 703 | NACAACUACCAGAUCAGGA | 4446-4464 | 4446 |
| 215 | NCCUGAUCUGGUAGUUGUN | 704 | NACAACUACCAGAUCAGGN | 4446-4464 | 4446 |
| 216 | CCCUGAUCUGGUAGUUGUA | 705 | UACAACUACCAGAUCAIGG | 4446-4464 | 4446 |
| 217 | UCCUGAUCUGGUAGUUGUA | 706 | UACAACUACCAGAUCAIGA | 4446-4464 | 4446 |
| 218 | NCCUGAUCUGGUAGUUGUA | 707 | UACAACUACCAGAUCAIGN | 4446-4464 | 4446 |
| 219 | UCCUGAUCUGGUAGUUGUN | 708 | NACAACUACCAGAUCAIGA | 4446-4464 | 4446 |
| 220 | NCCUGAUCUGGUAGUUGUN | 709 | NACAACUACCAGAUCAIGN | 4446-4464 | 4446 |
| 221 | UAGUUGUAGCAGAUGGGUG | 710 | CACCCAUCUGCUACAACUA | 5020-5038 | 5020 |
| 222 | NAGUUGUAGCAGAUGGGUG | 711 | CACCCAUCUGCUACAACUN | 5020-5038 | 5020 |
| 223 | UAGUUGUAGCAGAUGGGUN | 712 | NACCCAUCUGCUACAACUA | 5020-5038 | 5020 |
| 224 | NAGUUGUAGCAGAUGGGUN | 713 | NACCCAUCUGCUACAACUN | 5020-5038 | 5020 |
| 225 | GCAACACUGGAUGCGGAUC | 714 | GAUCCGCAUCCAGUGUUGC | 5042-5060 | 5042 |
| 226 | UCAACACUGGAUGCGGAUC | 715 | GAUCCGCAUCCAGUGUUGA | 5042-5060 | 5042 |
| 227 | NCAACACUGGAUGCGGAUC | 716 | GAUCCGCAUCCAGUGUUGA | 5042-5060 | 5042 |
| 228 | UCAACACUGGAUGCGGAUN | 717 | NAUCCGCAUCCAGUGUUGN | 5042-5060 | 5042 |
| 229 | NCAACACUGGAUGCGGAUN | 718 | NAUCCGCAUCCAGUGUUGN | 5042-5060 | 5042 |
| 230 | GCAACACUGGAUGCGGAUC | 719 | GAUCCGCAUCCAGUIUUGC | 5042-5060 | 5042 |
| 231 | UCAACACUGGAUGCGGAUC | 720 | GAUCCGCAUCCAGUIUUGA | 5042-5060 | 5042 |
| 232 | NCAACACUGGAUGCGGAUC | 721 | GAUCCGCAUCCAGUIUUGA | 5042-5060 | 5042 |
| 233 | UCAACACUGGAUGCGGAUN | 722 | NAUCCGCAUCCAGUIUUGN | 5042-5060 | 5042 |
| 234 | NCAACACUGGAUGCGGAUN | 723 | NAUCCGCAUCCAGUIUUGN | 5042-5060 | 5042 |
| 235 | GUGUUCGAUGCUCACCUCU | 724 | AGAGGUGAGCAUCGAACAC | 5441-5459 | 5441 |
| 236 | UUGUUCGAUGCUCACCUCU | 725 | AGAGGUGAGCAUCGAACAA | 5441-5459 | 5441 |
| 237 | NUGUUCGAUGCUCACCUCU | 726 | AGAGGUGAGCAUCGAACAN | 5441-5459 | 5441 |
| 238 | UUGUUCGAUGCUCACCUCN | 727 | NGAGGUGAGCAUCGAACAA | 5441-5459 | 5441 |
| 239 | NUGUUCGAUGCUCACCUCN | 728 | NGAGGUGAGCAUCGAACAN | 5441-5459 | 5441 |
| 240 | GUGUUCGAUGCUCACCUCU | 729 | AGAGGUGAGCAUCIAACAC | 5441-5459 | 5441 |
| 241 | UUGUUCGAUGCUCACCUCU | 730 | AGAGGUGAGCAUCIAACAA | 5441-5459 | 5441 |
| 242 | NUGUUCGAUGCUCACCUCU | 731 | AGAGGUGAGCAUCIAACAN | 5441-5459 | 5441 |
| 243 | UUGUUCGAUGCUCACCUCN | 732 | NGAGGUGAGCAUCIAACAA | 5441-5459 | 5441 |
| 244 | NUGUUCGAUGCUCACCUCN | 733 | NGAGGUGAGCAUCIAACAN | 5441-5459 | 5441 |
| 245 | CAUCUUGAAGGGUCCCUGC | 734 | GCAGGGACCCUUCAAGAUG | 5519-5537 | 5519 |
| 246 | UAUCUUGAAGGGUCCCUGC | 735 | GCAGGGACCCUUCAAGAUA | 5519-5537 | 5519 |
| 247 | NAUCUUGAAGGGUCCCUGC | 736 | GCAGGGACCCUUCAAGAUN | 5519-5537 | 5519 |
| 248 | UAUCUUGAAGGGUCCCUGN | 737 | NCAGGGACCCUUCAAGAUA | 5519-5537 | 5519 |
| 249 | NAUCUUGAAGGGUCCCUGN | 738 | NCAGGGACCCUUCAAGAUN | 5519-5537 | 5519 |
| 250 | UCGUAGUUGAGGCACAUCU | 739 | AGAUGUGCCUCAACUACGA | 5533-5551 | 5533 |
| 251 | NCGUAGUUGAGGCACAUCU | 740 | AGAUGUGCCUCAACUACGN | 5533-5551 | 5533 |
| 252 | UCGUAGUUGAGGCACAUCN | 741 | NGAUGUGCCUCAACUACGA | 5533-5551 | 5533 |
| 253 | NCGUAGUUGAGGCACAUCN | 742 | NGAUGUGCCUCAACUACGN | 5533-5551 | 5533 |
| 254 | UCGUAGUUGAGGCACAUCU | 743 | AGAUGUGCCUCAACUACIA | 5533-5551 | 5533 |
| 255 | NCGUAGUUGAGGCACAUCU | 744 | AGAUGUGCCUCAACUACIN | 5533-5551 | 5533 |
| 256 | UCGUAGUUGAGGCACAUCN | 745 | NGAUGUGCCUCAACUACIA | 5533-5551 | 5533 |
| 257 | NCGUAGUUGAGGCACAUCN | 746 | NGAUGUGCCUCAACUACIN | 5533-5551 | 5533 |
| 258 | CCUCGUAGUUGAGGCACAU | 747 | AUGUGCCUCAACUACGAGG | 5535-5553 | 5535 |
| 259 | UCUCGUAGUUGAGGCACAU | 748 | AUGUGCCUCAACUACGAGA | 5535-5553 | 5535 |
| 260 | NCUCGUAGUUGAGGCACAU | 749 | AUGUGCCUCAACUACGAGN | 5535-5553 | 5535 |
| 261 | UCUCGUAGUUGAGGCACAN | 750 | NUGUGCCUCAACUACGAGA | 5535-5553 | 5535 |
| 262 | NCUCGUAGUUGAGGCACAN | 751 | NUGUGCCUCAACUACGAGN | 5535-5553 | 5535 |
| 263 | CCUCGUAGUUGAGGCACAU | 752 | AUGUGCCUCAACUACIAGG | 5535-5553 | 5535 |
| 264 | UCUCGUAGUUGAGGCACAU | 753 | AUGUGCCUCAACUACIAGA | 5535-5553 | 5535 |
| 265 | NCUCGUAGUUGAGGCACAU | 754 | AUGUGCCUCAACUACIAGN | 5535-5553 | 5535 |
| 266 | UCUCGUAGUUGAGGCACAN | 755 | NUGUGCCUCAACUACIAGA | 5535-5553 | 5535 |
| 267 | NCUCGUAGUUGAGGCACAN | 756 | NUGUGCCUCAACUACIAGN | 5535-5553 | 5535 |
| 268 | CUUCAGGCAGGUCUCGCUG | 757 | CAGCGAGACCUGCCUGAAG | 1493-1511 | 1493 |
| 269 | UUUCAGGCAGGUCUCGCUG | 758 | CAGCGAGACCUGCCUGAAA | 1493-1511 | 1493 |
| 270 | NUUCAGGCAGGUCUCGCUG | 759 | CAGCGAGACCUGCCUGAAN | 1493-1511 | 1493 |
| 271 | UUUCAGGCAGGUCUCGCUN | 760 | NAGCGAGACCUGCCUGAAA | 1493-1511 | 1493 |
| 272 | NUUCAGGCAGGUCUCGCUN | 761 | NAGCGAGACCUGCCUGAAN | 1493-1511 | 1493 |
| 273 | GUCUGAAGAUGGUGACGUU | 762 | AACGUCACCAUCUUCAGAC | 1617-1635 | 1617 |
| 274 | UUCUGAAGAUGGUGACGUU | 763 | AACGUCACCAUCUUCAGAA | 1617-1635 | 1617 |
| 275 | NUCUGAAGAUGGUGACGUU | 764 | AACGUCACCAUCUUCAGAN | 1617-1635 | 1617 |
| 276 | UUCUGAAGAUGGUGACGUN | 765 | NACGUCACCAUCUUCAGAA | 1617-1635 | 1617 |
| 277 | NUCUGAAGAUGGUGACGUN | 766 | NACGUCACCAUCUUCAGAN | 1617-1635 | 1617 |
| 278 | GGUCUGAAGAUGGUGACGU | 767 | ACGUCACCAUCUUCAGACC | 1618-1636 | 1618 |
| 279 | UGUCUGAAGAUGGUGACGU | 768 | ACGUCACCAUCUUCAGACA | 1618-1636 | 1618 |
| 280 | NGUCUGAAGAUGGUGACGU | 769 | ACGUCACCAUCUUCAGACN | 1618-1636 | 1618 |
| 281 | UGUCUGAAGAUGGUGACGN | 770 | NCGUCACCAUCUUCAGACA | 1618-1636 | 1618 |
| 282 | NGUCUGAAGAUGGUGACGN | 771 | NCGUCACCAUCUUCAGACN | 1618-1636 | 1618 |
| 283 | GGUCUGAAGAUGGUGACGU | 772 | ACGUCACCAUCUUCAIACC | 1618-1636 | 1618 |
| 284 | UGUCUGAAGAUGGUGACGU | 773 | ACGUCACCAUCUUCAIACA | 1618-1636 | 1618 |
| 285 | NGUCUGAAGAUGGUGACGU | 774 | ACGUCACCAUCUUCAIACN | 1618-1636 | 1618 |
| 286 | UGUCUGAAGAUGGUGACGN | 775 | NCGUCACCAUCUUCAIACA | 1618-1636 | 1618 |
| 287 | NGUCUGAAGAUGGUGACGN | 776 | NCGUCACCAUCUUCAIACN | 1618-1636 | 1618 |
| 288 | CGGAAGUCAUCGGCCUGGA | 777 | UCCAGGCCGAUGACUUCCG | 1777-1795 | 1777 |
| 289 | UGGAAGUCAUCGGCCUGGA | 778 | UCCAGGCCGAUGACUUCCA | 1777-1795 | 1777 |
| 290 | NGGAAGUCAUCGGCCUGGA | 779 | UCCAGGCCGAUGACUUCCN | 1777-1795 | 1777 |
| 291 | UGGAAGUCAUCGGCCUGGN | 780 | NCCAGGCCGAUGACUUCCA | 1777-1795 | 1777 |
| 292 | NGGAAGUCAUCGGCCUGGN | 781 | NCCAGGCCGAUGACUUCCN | 1777-1795 | 1777 |
| 293 | CUUGAAGGUGUUGAAGAAG | 782 | CUUCUUCAACACCUUCAAG | 1832-1850 | 1832 |
| 294 | UUUGAAGGUGUUGAAGAAG | 783 | CUUCUUCAACACCUUCAAA | 1832-1850 | 1832 |
| 295 | NUUGAAGGUGUUGAAGAAG | 784 | CUUCUUCAACACCUUCAAN | 1832-1850 | 1832 |
| 296 | UUUGAAGGUGUUGAAGAAN | 785 | NUUCUUCAACACCUUCAAA | 1832-1850 | 1832 |
| 297 | NUUGAAGGUGUUGAAGAAN | 786 | NUUCUUCAACACCUUCAAN | 1832-1850 | 1832 |
| 298 | UGCAGUUCGAGUAGUAGGU | 787 | ACCUACUACUCGAACUGCA | 2001-2019 | 2001 |
| 299 | NGCAGUUCGAGUAGUAGGU | 788 | ACCUACUACUCGAACUGCN | 2001-2019 | 2001 |
| 300 | UGCAGUUCGAGUAGUAGGN | 789 | NCCUACUACUCGAACUGCA | 2001-2019 | 2001 |
| 301 | NGCAGUUCGAGUAGUAGGN | 790 | NCCUACUACUCGAACUGCN | 2001-2019 | 2001 |
| 302 | UGCAGUUCGAGUAGUAGGU | 791 | ACCUACUACUCGAACUICA | 2001-2019 | 2001 |
| 303 | NGCAGUUCGAGUAGUAGGU | 792 | ACCUACUACUCGAACUICN | 2001-2019 | 2001 |
| 304 | UGCAGUUCGAGUAGUAGGN | 793 | NCCUACUACUCGAACUICA | 2001-2019 | 2001 |
| 305 | NGCAGUUCGAGUAGUAGGN | 794 | NCCUACUACUCGAACUICN | 2001-2019 | 2001 |
| 306 | CUUGGAGCAGGUGGUCCCU | 795 | AGGGACCACCUGCUCCAAG | 2915-2933 | 2915 |
| 307 | UUUGGAGCAGGUGGUCCCU | 796 | AGGGACCACCUGCUCCAAA | 2915-2933 | 2915 |
| 308 | NUUGGAGCAGGUGGUCCCU | 797 | AGGGACCACCUGCUCCAAN | 2915-2933 | 2915 |
| 309 | UUUGGAGCAGGUGGUCCCN | 798 | NGGGACCACCUGCUCCAAA | 2915-2933 | 2915 |
| 310 | NUUGGAGCAGGUGGUCCCN | 799 | NGGGACCACCUGCUCCAAN | 2915-2933 | 2915 |
| 311 | UCUUGAUGGCCUUGGAGCA | 800 | UGCUCCAAGGCCAUCAAGA | 2925-2943 | 2925 |
| 312 | NCUUGAUGGCCUUGGAGCA | 801 | UGCUCCAAGGCCAUCAAGN | 2925-2943 | 2925 |
| 313 | UCUUGAUGGCCUUGGAGCN | 802 | NGCUCCAAGGCCAUCAAGA | 2925-2943 | 2925 |
| 314 | NCUUGAUGGCCUUGGAGCN | 803 | NGCUCCAAGGCCAUCAAGN | 2925-2943 | 2925 |
| 315 | CUGUCAUCGUGGUUCCACA | 804 | UGUGGAACCACGAUGACAG | 610-628 | 610 |
| 316 | UUGUCAUCGUGGUUCCACA | 805 | UGUGGAACCACGAUGACAA | 610-628 | 610 |
| 317 | NUGUCAUCGUGGUUCCACA | 806 | UGUGGAACCACGAUGACAN | 610-628 | 610 |
| 318 | UUGUCAUCGUGGUUCCACN | 807 | NGUGGAACCACGAUGACAA | 610-628 | 610 |
| 319 | NUGUCAUCGUGGUUCCACN | 808 | NGUGGAACCACGAUGACAN | 610-628 | 610 |
| 320 | CUGUCAUCGUGGUUCCACA | 809 | UGUGGAACCACGAUIACAG | 610-628 | 610 |
| 321 | UUGUCAUCGUGGUUCCACA | 810 | UGUGGAACCACGAUIACAA | 610-628 | 610 |
| 322 | NUGUCAUCGUGGUUCCACA | 811 | UGUGGAACCACGAUIACAN | 610-628 | 610 |
| 323 | UUGUCAUCGUGGUUCCACN | 812 | NGUGGAACCACGAUIACAA | 610-628 | 610 |
| 324 | NUGUCAUCGUGGUUCCACN | 813 | NGUGGAACCACGAUIACAN | 610-628 | 610 |
| 325 | ACAGAAGCAGAGGUCUUGC | 814 | GCAAGACCUCUGCUUCUGU | 923-941 | 923 |
| 326 | ACAGAAGCAGAGGUCUUGN | 815 | NCAAGACCUCUGCUUCUGU | 923-941 | 923 |
| 327 | UCAGAAGCAGAGGUCUUGC | 816 | GCAAGACCUCUGCUUCUGA | 923-941 | 923 |
| 328 | UCAGAAGCAGAGGUCUUGN | 817 | NCAAGACCUCUGCUUCUGA | 923-941 | 923 |
| 329 | ACAGAAGCAGAGGUCUUGC | 818 | GCAAGACCUCUGCUUCUIU | 923-941 | 923 |
| 330 | ACAGAAGCAGAGGUCUUGN | 819 | NCAAGACCUCUGCUUCUIU | 923-941 | 923 |
| 331 | UCAGAAGCAGAGGUCUUGC | 820 | GCAAGACCUCUGCUUCUIA | 923-941 | 923 |
| 332 | UCAGAAGCAGAGGUCUUGN | 821 | NCAAGACCUCUGCUUCUIA | 923-941 | 923 |
| 333 | GCAGUUGGUGCAGUCUGUG | 822 | CACAGACUGCACCAACUGC | 1277-1295 | 1277 |
| 334 | UCAGUUGGUGCAGUCUGUG | 823 | CACAGACUGCACCAACUGA | 1277-1295 | 1277 |
| 335 | NCAGUUGGUGCAGUCUGUG | 824 | CACAGACUGCACCAACUGA | 1277-1295 | 1277 |
| 336 | UCAGUUGGUGCAGUCUGUN | 825 | NACAGACUGCACCAACUGN | 1277-1295 | 1277 |
| 337 | NCAGUUGGUGCAGUCUGUN | 826 | NACAGACUGCACCAACUGN | 1277-1295 | 1277 |
| 338 | GCAGUUGGUGCAGUCUGUG | 827 | CACAGACUGCACCAACUIC | 1277-1295 | 1277 |
| 339 | UCAGUUGGUGCAGUCUGUG | 828 | CACAGACUGCACCAACUIA | 1277-1295 | 1277 |
| 340 | NCAGUUGGUGCAGUCUGUG | 829 | CACAGACUGCACCAACUIA | 1277-1295 | 1277 |
| 341 | UCAGUUGGUGCAGUCUGUN | 830 | NACAGACUGCACCAACUIN | 1277-1295 | 1277 |
| 342 | NCAGUUGGUGCAGUCUGUN | 831 | NACAGACUGCACCAACUIN | 1277-1295 | 1277 |
| 343 | GCAGUACAGUGAAGGCACU | 832 | AGUGCCUUCACUGUACUGC | 1446-1464 | 1446 |
| 344 | UCAGUACAGUGAAGGCACU | 833 | AGUGCCUUCACUGUACUGA | 1446-1464 | 1446 |
| 345 | NCAGUACAGUGAAGGCACU | 834 | AGUGCCUUCACUGUACUGN | 1446-1464 | 1446 |
| 346 | UCAGUACAGUGAAGGCACN | 835 | NGUGCCUUCACUGUACUGA | 1446-1464 | 1446 |
| 347 | NCAGUACAGUGAAGGCACN | 836 | NGUGCCUUCACUGUACUGN | 1446-1464 | 1446 |
| 348 | GCAGUACAGUGAAGGCACU | 837 | AGUGCCUUCACUGUACUIC | 1446-1464 | 1446 |
| 349 | UCAGUACAGUGAAGGCACU | 838 | AGUGCCUUCACUGUACUIA | 1446-1464 | 1446 |
| 350 | NCAGUACAGUGAAGGCACU | 839 | AGUGCCUUCACUGUACUIN | 1446-1464 | 1446 |
| 351 | UCAGUACAGUGAAGGCACN | 840 | NGUGCCUUCACUGUACUIA | 1446-1464 | 1446 |
| 352 | NCAGUACAGUGAAGGCACN | 841 | NGUGCCUUCACUGUACUIN | 1446-1464 | 1446 |
| 353 | UGCUGUUGAAGUUCCCACA | 842 | UGUGGGAACUUCAACAGCA | 1758-1776 | 1758 |
| 354 | NGCUGUUGAAGUUCCCACA | 843 | UGUGGGAACUUCAACAGCN | 1758-1776 | 1758 |
| 355 | UGCUGUUGAAGUUCCCACN | 844 | NGUGGGAACUUCAACAGCA | 1758-1776 | 1758 |
| 356 | NGCUGUUGAAGUUCCCACN | 845 | NGUGGGAACUUCAACAGCN | 1758-1776 | 1758 |
| 357 | UGCUGUUGAAGUUCCCACA | 846 | UGUGGGAACUUCAACAICA | 1758-1776 | 1758 |
| 358 | NGCUGUUGAAGUUCCCACA | 847 | UGUGGGAACUUCAACAICN | 1758-1776 | 1758 |
| 359 | UGCUGUUGAAGUUCCCACN | 848 | NGUGGGAACUUCAACAICA | 1758-1776 | 1758 |
| 360 | NGCUGUUGAAGUUCCCACN | 849 | NGUGGGAACUUCAACAICN | 1758-1776 | 1758 |
| 361 | GGAUGCUGUUGAAGUUCCC | 850 | GGGAACUUCAACAGCAUCC | 1761-1779 | 1761 |
| 362 | UGAUGCUGUUGAAGUUCCC | 851 | GGGAACUUCAACAGCAUCA | 1761-1779 | 1761 |
| 363 | NGAUGCUGUUGAAGUUCCC | 852 | GGGAACUUCAACAGCAUCN | 1761-1779 | 1761 |
| 364 | UGAUGCUGUUGAAGUUCCN | 853 | NGGAACUUCAACAGCAUCA | 1761-1779 | 1761 |
| 365 | NGAUGCUGUUGAAGUUCCN | 854 | NGGAACUUCAACAGCAUCN | 1761-1779 | 1761 |
| 366 | GGAUGCUGUUGAAGUUCCC | 855 | GGGAACUUCAACAICAUCC | 1761-1779 | 1761 |
| 367 | UGAUGCUGUUGAAGUUCCC | 856 | GGGAACUUCAACAICAUCA | 1761-1779 | 1761 |
| 368 | NGAUGCUGUUGAAGUUCCC | 857 | GGGAACUUCAACAICAUCN | 1761-1779 | 1761 |
| 369 | UGAUGCUGUUGAAGUUCCN | 858 | NGGAACUUCAACAICAUCA | 1761-1779 | 1761 |
| 370 | NGAUGCUGUUGAAGUUCCN | 859 | NGGAACUUCAACAICAUCN | 1761-1779 | 1761 |
| 371 | GGGUCUUGAAGGUGUUGAA | 860 | UUCAACACCUUCAAGACCC | 1836-1854 | 1836 |
| 372 | UGGUCUUGAAGGUGUUGAA | 861 | UUCAACACCUUCAAGACCA | 1836-1854 | 1836 |
| 373 | NGGUCUUGAAGGUGUUGAA | 862 | UUCAACACCUUCAAGACCN | 1836-1854 | 1836 |
| 374 | UGGUCUUGAAGGUGUUGAN | 863 | NUCAACACCUUCAAGACCA | 1836-1854 | 1836 |
| 375 | NGGUCUUGAAGGUGUUGAN | 864 | NUCAACACCUUCAAGACCN | 1836-1854 | 1836 |
| 376 | GGGUCUUGAAGGUGUUGAA | 865 | UUCAACACCUUCAAIACCC | 1836-1854 | 1836 |
| 377 | UGGUCUUGAAGGUGUUGAA | 866 | UUCAACACCUUCAAIACCA | 1836-1854 | 1836 |
| 378 | NGGUCUUGAAGGUGUUGAA | 867 | UUCAACACCUUCAAIACCN | 1836-1854 | 1836 |
| 379 | UGGUCUUGAAGGUGUUGAN | 868 | NUCAACACCUUCAAIACCA | 1836-1854 | 1836 |
| 380 | NGGUCUUGAAGGUGUUGAN | 869 | NUCAACACCUUCAAIACCN | 1836-1854 | 1836 |
| 381 | AAGCUGUUCCUGAUGUUGG | 870 | CCAACAUCAGGAACAGCUU | 1867-1885 | 1867 |
| 382 | AAGCUGUUCCUGAUGUUGN | 871 | NCAACAUCAGGAACAGCUU | 1867-1885 | 1867 |
| 383 | UAGCUGUUCCUGAUGUUGG | 872 | CCAACAUCAGGAACAGCUN | 1867-1885 | 1867 |
| 384 | UAGCUGUUCCUGAUGUUGN | 873 | NCAACAUCAGGAACAGCUU | 1867-1885 | 1867 |
| 385 | NAGCUGUUCCUGAUGUUGN | 874 | NCAACAUCAGGAACAGCUN | 1867-1885 | 1867 |
| 386 | AAGCUGUUCCUGAUGUUGG | 875 | CCAACAUCAGGAACAICUU | 1867-1885 | 1867 |
| 387 | AAGCUGUUCCUGAUGUUGN | 876 | NCAACAUCAGGAACAICUU | 1867-1885 | 1867 |
| 388 | UAGCUGUUCCUGAUGUUGG | 877 | CCAACAUCAGGAACAICUN | 1867-1885 | 1867 |
| 389 | UAGCUGUUCCUGAUGUUGN | 878 | NCAACAUCAGGAACAICUU | 1867-1885 | 1867 |
| 390 | NAGCUGUUCCUGAUGUUGN | 879 | NCAACAUCAGGAACAICUN | 1867-1885 | 1867 |
| 391 | ACAUGCAGUUCGAGUAGUA | 880 | UACUACUCGAACUGCAUGU | 2004-2022 | 2004 |
| 392 | ACAUGCAGUUCGAGUAGUN | 881 | NACUACUCGAACUGCAUGU | 2004-2022 | 2004 |
| 393 | UCAUGCAGUUCGAGUAGUA | 882 | UACUACUCGAACUGCAUGA | 2004-2022 | 2004 |
| 394 | UCAUGCAGUUCGAGUAGUN | 883 | NACUACUCGAACUGCAUGA | 2004-2022 | 2004 |
| 395 | NCAUGCAGUUCGAGUAGUN | 884 | NACUACUCGAACUGCAUGN | 2004-2022 | 2004 |
| 396 | GAAGCCAACACUGCAGGUG | 885 | CACCUGCAGUGUUGGCUUC | 2234-2252 | 2234 |
| 397 | UAAGCCAACACUGCAGGUG | 886 | CACCUGCAGUGUUGGCUUA | 2234-2252 | 2234 |
| 398 | NAAGCCAACACUGCAGGUG | 887 | CACCUGCAGUGUUGGCUUN | 2234-2252 | 2234 |
| 399 | UAAGCCAACACUGCAGGUN | 888 | NACCUGCAGUGUUGGCUUA | 2234-2252 | 2234 |
| 400 | NAAGCCAACACUGCAGGUN | 889 | NACCUGCAGUGUUGGCUUN | 2234-2252 | 2234 |
| 401 | GAAGCCAACACUGCAGGUG | 890 | CACCUGCAGUGUUGICUUC | 2234-2252 | 2234 |
| 402 | UAAGCCAACACUGCAGGUG | 891 | CACCUGCAGUGUUGICUUA | 2234-2252 | 2234 |
| 403 | NAAGCCAACACUGCAGGUG | 892 | CACCUGCAGUGUUGICUUN | 2234-2252 | 2234 |
| 404 | UAAGCCAACACUGCAGGUN | 893 | NACCUGCAGUGUUGICUUA | 2234-2252 | 2234 |
| 405 | NAAGCCAACACUGCAGGUN | 894 | NACCUGCAGUGUUGICUUN | 2234-2252 | 2234 |
| 406 | CUGUAACAGGUCAUGUCCA | 895 | UGGACAUGACCUGUUACAG | 2536-2554 | 2536 |
| 407 | UUGUAACAGGUCAUGUCCA | 896 | UGGACAUGACCUGUUACAA | 2536-2554 | 2536 |
| 408 | NUGUAACAGGUCAUGUCCA | 897 | UGGACAUGACCUGUUACAN | 2536-2554 | 2536 |
| 409 | UUGUAACAGGUCAUGUCCN | 898 | NGGACAUGACCUGUUACAA | 2536-2554 | 2536 |
| 410 | NUGUAACAGGUCAUGUCCN | 899 | NGGACAUGACCUGUUACAN | 2536-2554 | 2536 |
| 411 | CCGUUGAAGCUGUAGCUCU | 900 | AGAGCUACAGCUUCAACGG | 2797-2815 | 2797 |
| 412 | UCGUUGAAGCUGUAGCUCU | 901 | AGAGCUACAGCUUCAACGA | 2797-2815 | 2797 |
| 413 | NCGUUGAAGCUGUAGCUCU | 902 | AGAGCUACAGCUUCAACGN | 2797-2815 | 2797 |
| 414 | UCGUUGAAGCUGUAGCUCN | 903 | NGAGCUACAGCUUCAACGA | 2797-2815 | 2797 |
| 415 | NCGUUGAAGCUGUAGCUCN | 904 | NGAGCUACAGCUUCAACGN | 2797-2815 | 2797 |
| 416 | CCGUUGAAGCUGUAGCUCU | 905 | AGAGCUACAGCUUCAACIG | 2797-2815 | 2797 |
| 417 | UCGUUGAAGCUGUAGCUCU | 906 | AGAGCUACAGCUUCAACIA | 2797-2815 | 2797 |
| 418 | NCGUUGAAGCUGUAGCUCU | 907 | AGAGCUACAGCUUCAACIN | 2797-2815 | 2797 |
| 419 | UCGUUGAAGCUGUAGCUCN | 908 | NGAGCUACAGCUUCAACIA | 2797-2815 | 2797 |
| 420 | NCGUUGAAGCUGUAGCUCN | 909 | NGAGCUACAGCUUCAACIN | 2797-2815 | 2797 |
| 421 | CAGUACAGUGAAGGCACUG | 910 | CAGUGCCUUCACUGUACUG | 1445-1463 | 1445 |
| 422 | UAGUACAGUGAAGGCACUG | 911 | CAGUGCCUUCACUGUACUA | 1445-1463 | 1445 |
| 423 | UAGUACAGUGAAGGCACUN | 912 | NAGUGCCUUCACUGUACUA | 1445-1463 | 1445 |
| 424 | NAGUACAGUGAAGGCACUG | 913 | CAGUGCCUUCACUGUACUN | 1445-1463 | 1445 |
| 425 | NAGUACAGUGAAGGCACUN | 914 | NAGUGCCUUCACUGUACUN | 1445-1463 | 1445 |
| 426 | CUCGAAGCUGUUCCUGAUG | 915 | CAUCAGGAACAGCUUCGAG | 1871-1889 | 1871 |
| 427 | UUCGAAGCUGUUCCUGAUG | 916 | CAUCAGGAACAGCUUCGAA | 1871-1889 | 1871 |
| 428 | UUCGAAGCUGUUCCUGAUN | 917 | NAUCAGGAACAGCUUCGAA | 1871-1889 | 1871 |
| 429 | NUCGAAGCUGUUCCUGAUG | 918 | CAUCAGGAACAGCUUCGAN | 1871-1889 | 1871 |
| 430 | NUCGAAGCUGUUCCUGAUN | 919 | NAUCAGGAACAGCUUCGAN | 1871-1889 | 1871 |
| 431 | CUCGAAGCUGUUCCUGAUG | 920 | CAUCAGGAACAGCUUCIAG | 1871-1889 | 1871 |
| 432 | UUCGAAGCUGUUCCUGAUG | 921 | CAUCAGGAACAGCUUCIAA | 1871-1889 | 1871 |
| 433 | UUCGAAGCUGUUCCUGAUN | 922 | NAUCAGGAACAGCUUCIAA | 1871-1889 | 1871 |
| 434 | NUCGAAGCUGUUCCUGAUG | 923 | CAUCAGGAACAGCUUCIAN | 1871-1889 | 1871 |
| 435 | NUCGAAGCUGUUCCUGAUN | 924 | NAUCAGGAACAGCUUCIAN | 1871-1889 | 1871 |
| 436 | UCUUGUUCAGGCAAAUCAG | 925 | CUGAUUUGCCUGAACAAGA | 4992-5010 | 4992 |
| 437 | UCUUGUUCAGGCAAAUCAN | 926 | NUGAUUUGCCUGAACAAGA | 4992-5010 | 4992 |
| 438 | NCUUGUUCAGGCAAAUCAG | 927 | CUGAUUUGCCUGAACAAGN | 4992-5010 | 4992 |
| 439 | NCUUGUUCAGGCAAAUCAN | 928 | NUGAUUUGCCUGAACAAGN | 4992-5010 | 4992 |
| 440 | UCACCAAAGUGGUUGUCCU | 929 | AGGACAACCACUUUGGUGA | 6798-6816 | 6798 |
| 441 | UCACCAAAGUGGUUGUCCN | 930 | NGGACAACCACUUUGGUGA | 6798-6816 | 6798 |
| 442 | NCACCAAAGUGGUUGUCCU | 931 | AGGACAACCACUUUGGUGN | 6798-6816 | 6798 |
| 443 | NCACCAAAGUGGUUGUCCN | 932 | NGGACAACCACUUUGGUGN | 6798-6816 | 6798 |
| 444 | UCACCAAAGUGGUUGUCCU | 933 | AGGACAACCACUUUIGUGA | 6798-6816 | 6798 |
| 445 | UCACCAAAGUGGUUGUCCN | 934 | NGGACAACCACUUUIGUGA | 6798-6816 | 6798 |
| 446 | NCACCAAAGUGGUUGUCCU | 935 | AGGACAACCACUUUIGUGN | 6798-6816 | 6798 |
| 447 | NCACCAAAGUGGUUGUCCN | 936 | NGGACAACCACUUUIGUGN | 6798-6816 | 6798 |
| 448 | GAGCAGAGGUUGUUCUGGU | 937 | ACCAGAACAACCUCUGCUC | 8739-8757 | 8739 |
| 449 | UAGCAGAGGUUGUUCUGGU | 938 | ACCAGAACAACCUCUGCUA | 8739-8757 | 8739 |
| 450 | UAGCAGAGGUUGUUCUGGN | 939 | NCCAGAACAACCUCUGCUA | 8739-8757 | 8739 |
| 451 | NAGCAGAGGUUGUUCUGGU | 940 | ACCAGAACAACCUCUGCUN | 8739-8757 | 8739 |
| 452 | NAGCAGAGGUUGUUCUGGN | 941 | NCCAGAACAACCUCUGCUN | 8739-8757 | 8739 |
| 453 | GAGCAGAGGUUGUUCUGGU | 942 | ACCAGAACAACCUCUICUC | 8739-8757 | 8739 |
| 454 | UAGCAGAGGUUGUUCUGGU | 943 | ACCAGAACAACCUCUICUA | 8739-8757 | 8739 |
| 455 | UAGCAGAGGUUGUUCUGGN | 944 | NCCAGAACAACCUCUICUA | 8739-8757 | 8739 |
| 456 | NAGCAGAGGUUGUUCUGGU | 945 | ACCAGAACAACCUCUICUN | 8739-8757 | 8739 |
| 457 | NAGCAGAGGUUGUUCUGGN | 946 | NCCAGAACAACCUCUICUN | 8739-8757 | 8739 |
| 458 | UAGAUUGUGCUGGUUGUAG | 947 | CUACAACCAGCACAAUCUC | 9310-9328 | 9310 |
| 459 | UAGAUUGUGCUGGUUGUAG | 948 | CUACAACCAGCACAAUCUA | 9310-9328 | 9310 |
| 460 | NAGAUUGUGCUGGUUGUAG | 949 | CUACAACCAGCACAAUCUN | 9310-9328 | 9310 |
| 461 | UAGAUUGUGCUGGUUGUAN | 950 | NUACAACCAGCACAAUCUA | 9310-9328 | 9310 |
| 462 | NAGAUUGUGCUGGUUGUAN | 951 | NUACAACCAGCACAAUCUN | 9310-9328 | 9310 |
| 463 | CAGAAGUUGUGCUGGUUGU | 952 | ACAACCAGCACAACUUCUG | 10206-10224 | 10206 |
| 464 | UAGAAGUUGUGCUGGUUGU | 953 | ACAACCAGCACAACUUCUA | 10206-10224 | 10206 |
| 465 | NAGAAGUUGUGCUGGUUGU | 954 | ACAACCAGCACAACUUCUN | 10206-10224 | 10206 |
| 466 | UAGAAGUUGUGCUGGUUGN | 955 | NCAACCAGCACAACUUCUA | 10206-10224 | 10206 |
| 467 | NAGAAGUUGUGCUGGUUGN | 956 | NCAACCAGCACAACUUCUN | 10206-10224 | 10206 |
| 468 | CUUGUCACCAAAGUGGUUG | 957 | CAACCACUUUGGUGACAAG | 11014-11032 | 11014 |
| 469 | UUUGUCACCAAAGUGGUUG | 958 | CAACCACUUUGGUGACAAA | 11014-11032 | 11014 |
| 470 | NUUGUCACCAAAGUGGUUG | 959 | CAACCACUUUGGUGACAAN | 11014-11032 | 11014 |
| 471 | UUUGUCACCAAAGUGGUUN | 960 | NAACCACUUUGGUGACAAA | 11014-11032 | 11014 |
| 472 | NUUGUCACCAAAGUGGUUN | 961 | NAACCACUUUGGUGACAAN | 11014-11032 | 11014 |
| 473 | CAGAGGUUGUGUUGGUUGU | 962 | ACAACCAACACAACUUCUG | 11361-11379 | 11361 |
| 474 | UAGAGGUUGUGUUGGUUGU | 963 | ACAACCAACACAACUUCUA | 11361-11379 | 11361 |
| 475 | NAGAGGUUGUGUUGGUUGU | 964 | ACAACCAACACAACUUCUN | 11361-11379 | 11361 |
| 476 | UAGAGGUUGUGUUGGUUGN | 965 | NCAACCAACACAACUUCUA | 11361-11379 | 11361 |
| 477 | NAGAGGUUGUGUUGGUUGN | 966 | NCAACCAACACAACUUCUN | 11361-11379 | 11361 |
| 478 | UCUAGUUGUAGGAGCAGAG | 967 | CUCUGCUCCUACAACUAGA | 12965-12983 | 12965 |
| 479 | GCUAGUUGUAGGAGCAGAG | 968 | CUCUGCUCCUACAACUAGC | 12965-12983 | 12965 |
| 480 | NCUAGUUGUAGGAGCAGAG | 969 | CUCUGCUCCUACAACUAGN | 12965-12983 | 12965 |
| 481 | UCUAGUUGUAGGAGCAGAN | 970 | NUCUGCUCCUACAACUAGA | 12965-12983 | 12965 |
| 482 | NCUAGUUGUAGGAGCAGAN | 971 | NUCUGCUCCUACAACUAGN | 12965-12983 | 12965 |
| 483 | UGGUUCAGGAACACUUCCC | 972 | GGGAAGUGUUCCUGAACCA | 1567-1585 | 1567 |
| 484 | NGGUUCAGGAACACUUCCC | 973 | GGGAAGUGUUCCUGAACCN | 1567-1585 | 1567 |
| 485 | UGGUUCAGGAACACUUCCN | 974 | NGGAAGUGUUCCUGAACCA | 1567-1585 | 1567 |
| 486 | NGGUUCAGGAACACUUCCN | 975 | NGGAAGUGUUCCUGAACCN | 1567-1585 | 1567 |
| 487 | UGGUUCAGGAACACUUCCC | 976 | GGGAAGUGUUCCUIAACCA | 1567-1585 | 1567 |
| 488 | NGGUUCAGGAACACUUCCC | 977 | GGGAAGUGUUCCUIAACCN | 1567-1585 | 1567 |
| 489 | UGGUUCAGGAACACUUCCN | 978 | NGGAAGUGUUCCUIAACCA | 1567-1585 | 1567 |
| 490 | NGGUUCAGGAACACUUCCN | 979 | NGGAAGUGUUCCUIAACCN | 1567-1585 | 1567 |
| 491 | GAUGUCGUCGAAGUUCCCA | 980 | UGGGAACUUCGACGACAUC | 3155-3173 | 3155 |
| 492 | UAUGUCGUCGAAGUUCCCA | 981 | UGGGAACUUCGACGACAUA | 3155-3173 | 3155 |
| 493 | NAUGUCGUCGAAGUUCCCA | 982 | UGGGAACUUCGACGACAUN | 3155-3173 | 3155 |
| 494 | UAUGUCGUCGAAGUUCCCN | 983 | NGGGAACUUCGACGACAUA | 3155-3173 | 3155 |
| 495 | NAUGUCGUCGAAGUUCCCN | 984 | NGGGAACUUCGACGACAUN | 3155-3173 | 3155 |
| 496 | GAUGUCGUCGAAGUUCCCA | 985 | UGGGAACUUCGACIACAUC | 3155-3173 | 3155 |
| 497 | UAUGUCGUCGAAGUUCCCA | 986 | UGGGAACUUCGACIACAUA | 3155-3173 | 3155 |
| 498 | NAUGUCGUCGAAGUUCCCA | 987 | UGGGAACUUCGACIACAUN | 3155-3173 | 3155 |
| 499 | UAUGUCGUCGAAGUUCCCN | 988 | NGGGAACUUCGACIACAUA | 3155-3173 | 3155 |
| 500 | NAUGUCGUCGAAGUUCCCN | 989 | NGGGAACUUCGACIACAUN | 3155-3173 | 3155 |
| 501 | AUUUCUGCCAAGAGGAGGU | 990 | ACCUCCUCUUGGCAGAAAU | 6777-6795 | 6777 |
| 502 | AUUUCUGCCAAGAGGAGGN | 991 | NCCUCCUCUUGGCAGAAAU | 6777-6795 | 6777 |
| 503 | UUUUCUGCCAAGAGGAGGU | 992 | ACCUCCUCUUGGCAGAAAA | 6777-6795 | 6777 |
| 504 | UUUUCUGCCAAGAGGAGGN | 993 | NCCUCCUCUUGGCAGAAAA | 6777-6795 | 6777 |
| 505 | NUUUCUGCCAAGAGGAGGN | 994 | NCCUCCUCUUGGCAGAAAN | 6777-6795 | 6777 |
| 506 | AUUUCUGCCAAGAGGAGGU | 995 | ACCUCCUCUUGICAGAAAU | 6777-6795 | 6777 |
| 507 | AUUUCUGCCAAGAGGAGGN | 996 | NCCUCCUCUUGICAGAAAU | 6777-6795 | 6777 |
| 508 | UUUUCUGCCAAGAGGAGGU | 997 | ACCUCCUCUUGICAGAAAA | 6777-6795 | 6777 |
| 509 | UUUUCUGCCAAGAGGAGGN | 998 | NCCUCCUCUUGICAGAAAA | 6777-6795 | 6777 |
| 510 | NUUUCUGCCAAGAGGAGGN | 999 | NCCUCCUCUUGICAGAAAN | 6777-6795 | 6777 |
| 511 | UGUUGUUGAAGAUGAUCUC | 1000 | GAGAUCAUCUUCAACAACA | 15051-15069 | 15051 |
| 512 | UGUUGUUGAAGAUGAUCUN | 1001 | NAGAUCAUCUUCAACAACA | 15051-15069 | 15051 |
| 513 | NGUUGUUGAAGAUGAUCUC | 1002 | GAGAUCAUCUUCAACAACN | 15051-15069 | 15051 |
| 514 | NGUUGUUGAAGAUGAUCUN | 1003 | NAGAUCAUCUUCAACAACN | 15051-15069 | 15051 |
| 515 | UGUUGUUGUAGGUUUCCUU | 1004 | AAGGAAACCUACAACAACA | 5346-5364 | 5346 |
| 516 | NGUUGUUGUAGGUUUCCUU | 1005 | AAGGAAACCUACAACAACN | 5346-5364 | 5346 |
| 517 | UGUUGUUGUAGGUUUCCUN | 1006 | NAGGAAACCUACAACAACA | 5346-5364 | 5346 |
| 518 | NGUUGUUGUAGGUUUCCUN | 1007 | NAGGAAACCUACAACAACN | 5346-5364 | 5346 |
| 519 | AUCUUGUCCUCAUCAAAGA | 1008 | UCUUUGAUGAGGACAAGAU | 3694-3712 | 3694 |
| 520 | AUCUUGUCCUCAUCAAAGN | 1009 | NCUUUGAUGAGGACAAGAU | 3694-3712 | 3694 |
| 521 | NUCUUGUCCUCAUCAAAGN | 1010 | NCUUUGAUGAGGACAAGAN | 3694-3712 | 3694 |
| 522 | UUCUUGUCCUCAUCAAAGA | 1011 | UCUUUGAUGAGGACAAGAA | 3694-3712 | 3694 |
| 523 | UUCUUGUCCUCAUCAAAGN | 1012 | NCUUUGAUGAGGACAAGAA | 3694-3712 | 3694 |
| 524 | GCAUCUUGUCCUCAUCAAA | 1013 | UUUGAUGAGGACAAGAUGC | 3696-3714 | 3696 |
| 525 | UCAUCUUGUCCUCAUCAAA | 1014 | UUUGAUGAGGACAAGAUGA | 3696-3714 | 3696 |
| 526 | UCAUCUUGUCCUCAUCAAN | 1015 | NUUGAUGAGGACAAGAUGA | 3696-3714 | 3696 |
| 527 | NCAUCUUGUCCUCAUCAAA | 1016 | UUUGAUGAGGACAAGAUGN | 3696-3714 | 3696 |
| 528 | NCAUCUUGUCCUCAUCAAN | 1017 | NUUGAUGAGGACAAGAUGN | 3696-3714 | 3696 |
| 529 | GCUAGUUGUAGGAGCAGAG | 1018 | CUCUGCUCCUACAACUAGC | 6998-7016 | 6998 |
| 530 | UCUAGUUGUAGGAGCAGAG | 1019 | CUCUGCUCCUACAACUAGA | 6998-7016 | 6998 |
| 531 | NCUAGUUGUAGGAGCAGAG | 1020 | CUCUGCUCCUACAACUAGN | 6998-7016 | 6998 |
| 532 | UCUAGUUGUAGGAGCAGAN | 1021 | NUCUGCUCCUACAACUAGA | 6998-7016 | 6998 |
| 533 | NCUAGUUGUAGGAGCAGAN | 1022 | NUCUGCUCCUACAACUAGN | 6998-7016 | 6998 |
| 534 | UAGUUGUAGAAGCAGAGGU | 1023 | ACCUCUGCUUCUACAACUA | 7980-7998 | 7980 |
| 535 | NAGUUGUAGAAGCAGAGGU | 1024 | ACCUCUGCUUCUACAACUN | 7980-7998 | 7980 |
| 536 | UAGUUGUAGAAGCAGAGGN | 1025 | NCCUCUGCUUCUACAACUA | 7980-7998 | 7980 |
| 537 | NAGUUGUAGAAGCAGAGGN | 1026 | NCCUCUGCUUCUACAACUN | 7980-7998 | 7980 |
| 538 | CAGAAGUUGUGCUGGUUAU | 1027 | AUAACCAGCACAACUUCUG | 8448-8466 | 8448 |
| 539 | UAGAAGUUGUGCUGGUUAU | 1028 | AUAACCAGCACAACUUCUA | 8448-8466 | 8448 |
| 540 | NAGAAGUUGUGCUGGUUAU | 1029 | AUAACCAGCACAACUUCUN | 8448-8466 | 8448 |
| 541 | UAGAAGUUGUGCUGGUUAN | 1030 | NUAACCAGCACAACUUCUA | 8448-8466 | 8448 |
| 542 | NAGAAGUUGUGCUGGUUAN | 1031 | NUAACCAGCACAACUUCUN | 8448-8466 | 8448 |
| 543 | CCAACACUGCAGGUGAUGU | 1032 | ACAUCACCUGCAGUGUUGG | 2230-2248 | 2230 |
| 544 | UCAACACUGCAGGUGAUGU | 1033 | ACAUCACCUGCAGUGUUGA | 2230-2248 | 2230 |
| 545 | NCAACACUGCAGGUGAUGU | 1034 | ACAUCACCUGCAGUGUUGN | 2230-2248 | 2230 |
| 546 | UCAACACUGCAGGUGAUGN | 1035 | NCAUCACCUGCAGUGUUGA | 2230-2248 | 2230 |
| 547 | NCAACACUGCAGGUGAUGN | 1036 | NCAUCACCUGCAGUGUUGN | 2230-2248 | 2230 |
| 548 | CCAACACUGCAGGUGAUGU | 1037 | ACAUCACCUGCAGUIUUGG | 2230-2248 | 2230 |
| 549 | UCAACACUGCAGGUGAUGU | 1038 | ACAUCACCUGCAGUIUUGA | 2230-2248 | 2230 |
| 550 | NCAACACUGCAGGUGAUGU | 1039 | ACAUCACCUGCAGUIUUGN | 2230-2248 | 2230 |
| 551 | UCAACACUGCAGGUGAUGN | 1040 | NCAUCACCUGCAGUIUUGA | 2230-2248 | 2230 |
| 552 | NCAACACUGCAGGUGAUGN | 1041 | NCAUCACCUGCAGUIUUGN | 2230-2248 | 2230 |
| 553 | CAUCUUGUCCUCAUCAAAG | 1042 | CUUUGAUGAGGACAAGAUG | 3695-3713 | 3695 |
| 554 | UAUCUUGUCCUCAUCAAAG | 1043 | CUUUGAUGAGGACAAGAUA | 3695-3713 | 3695 |
| 555 | NAUCUUGUCCUCAUCAAAG | 1044 | CUUUGAUGAGGACAAGAUN | 3695-3713 | 3695 |
| 556 | UAUCUUGUCCUCAUCAAAN | 1045 | NUUUGAUGAGGACAAGAUA | 3695-3713 | 3695 |
| 557 | NAUCUUGUCCUCAUCAAAN | 1046 | NUUUGAUGAGGACAAGAUN | 3695-3713 | 3695 |
| 558 | GUCGUGUGGUAGAUGACGU | 1047 | ACGUCAUCUACCACACGAC | 3910-3928 | 3910 |
| 559 | UUCGUGUGGUAGAUGACGU | 1048 | ACGUCAUCUACCACACGAA | 3910-3928 | 3910 |
| 560 | NUCGUGUGGUAGAUGACGU | 1049 | ACGUCAUCUACCACACGAN | 3910-3928 | 3910 |
| 561 | UUCGUGUGGUAGAUGACGN | 1050 | NCGUCAUCUACCACACGAA | 3910-3928 | 3910 |
| 562 | NUCGUGUGGUAGAUGACGN | 1051 | NCGUCAUCUACCACACGAN | 3910-3928 | 3910 |
| 563 | GUCGUGUGGUAGAUGACGU | 1052 | ACGUCAUCUACCACACIAC | 3910-3928 | 3910 |
| 564 | UUCGUGUGGUAGAUGACGU | 1053 | ACGUCAUCUACCACACIAA | 3910-3928 | 3910 |
| 565 | NUCGUGUGGUAGAUGACGU | 1054 | ACGUCAUCUACCACACIAN | 3910-3928 | 3910 |
| 566 | UUCGUGUGGUAGAUGACGN | 1055 | NCGUCAUCUACCACACIAA | 3910-3928 | 3910 |
| 567 | NUCGUGUGGUAGAUGACGN | 1056 | NCGUCAUCUACCACACIAN | 3910-3928 | 3910 |

[0123] The MUC5AC RNAi agent sense strands and antisense strands that comprise or consist of the nucleotide sequences in Table 2 can be modified nucleotides or unmodified nucleotides. In some embodiments, the MUC5AC RNAi agents having the sense and antisense strand sequences that comprise or consist of any of the nucleotide sequences in Table 2 are all or substantially all modified nucleotides.

[0124] In some embodiments, the antisense strand of a MUC5AC RNAi agent disclosed herein comprises at least 15 contiguous nucleotides differing by 0, 1, 2, or 3 nucleotides from any of the antisense strand sequences in Table 2. In some embodiments, the sense strand of a MUC5AC RNAi agent disclosed herein comprises at least 15 contiguous nucleotides differing by 0, 1, 2, or 3 nucleotides from any of the sense strand sequences in Table 2.

[0125] As used herein, each N listed in a sequence disclosed in Table 2 may be independently selected from any and all nucleobases (including those found on both modified and unmodified nucleotides). In some embodiments, an N nucleotide listed in a sequence disclosed in Table 2 has a nucleobase that is complementary to the N nucleotide at the corresponding position on the other strand. In some embodiments, an N nucleotide listed in a sequence disclosed in Table 2 has a nucleobase that is not complementary to the N nucleotide at the corresponding position on the other strand. In some embodiments, an N nucleotide listed in a sequence disclosed in Table 2 has a nucleobase that is the same as the N nucleotide at the corresponding position on the other strand. In some embodiments, an N nucleotide listed in a sequence disclosed in Table 2 has a nucleobase that is different from the N nucleotide at the corresponding position on the other strand.

[0126] Certain modified MUC5AC RNAi agent sense and antisense strands are provided in Table 3, Table 4, Table 5, Table 6, Table 7, and Table 11. Certain modified MUC5AC RNAi agent antisense strands, as well as their underlying unmodified nucleobase sequences, are provided in Table 3. Certain modified MUC5AC RNAi agent sense strands, as well as their underlying unmodified nucleobase sequences, are provided in Tables 4, 5, and 6. In forming MUC5AC RNAi agents, each of the nucleotides in each of the underlying base sequences listed in Tables 3, 4, 5, 6, and 7, as well as in Table 2, above, can be a modified nucleotide.

[0127] The MUC5AC RNAi agents described herein are formed by annealing an antisense strand with a sense strand. A sense strand containing a sequence listed in Table 2, Table 4, Table 5, Table 6, Table 7, or Table 11 can be hybridized to any antisense strand containing a sequence listed in Table 2, Table 3, or Table 11, provided the two sequences have a region of at least 85% complementarity over a contiguous 16, 17, 18, 19, 20, or 21 nucleotide sequence.

[0128] In some embodiments, a MUC5AC RNAi agent antisense strand comprises a nucleotide sequence of any of the sequences in Table 2 or Table 3.

[0129] In some embodiments, a MUC5AC RNAi agent comprises or consists of a duplex having the nucleobase sequences of the sense strand and the antisense strand of any of the sequences in Table 2, Table 3, Table 4, Table 5, Table 6, Table 7, or Table 11.

[0130] Examples of antisense strands containing modified nucleotides are provided in Table 3. Examples of sense strands containing modified nucleotides are provided in Tables 4, 5 and 6.

[0131] As used in Tables 3, 4, 5, 6, 7, and 11, the following notations are used to indicate modified nucleotides, targeting groups, and linking groups:
[0132] A=adenosine-3′-phosphate
[0133] C=cytidine-3′-phosphate
[0134] G=guanosine-3′-phosphate
[0135] U=uridine-3′-phosphate
[0136] I=inosine-3′-phosphate
[0137] a=2′-O-methyladenosine-3′-phosphate
[0138] as=2′-O-methyladenosine-3′-phosphorothioate
[0139] c=2′-O-methylcytidine-3′-phosphate
[0140] cs=2′-O-methylcytidine-3′-phosphorothioate
[0141] g=2′-O-methylguanosine-3′-phosphate
[0142] gs=2′-O-methylguanosine-3′-phosphorothioate
[0143] i=2′-O-methylinosine-3′-phosphate
[0144] is=2′-O-methylinosine-3′-phosphorothioate
[0145] t=2′-O-methyl-5-methyluridine-3′-phosphate
[0146] ts=2′-O-methyl-5-methyluridine-3′-phosphorothioate
[0147] u=2′-O-methyluridine-3′-phosphate
[0148] us=2′-O-methyluridine-3′-phosphorothioate
[0149] Af=2′-fluoroadenosine-3′-phosphate
[0150] Afs=2′-fluoroadenosine-3′-phosporothioate
[0151] Cf=2′-fluorocytidine-3′-phosphate
[0152] Cfs=2′-fluorocytidine-3′-phosphorothioate
[0153] Gf=2′-fluoroguanosine-3′-phosphate
[0154] Gfs=2′-fluoroguanosine-3′-phosphorothioate
[0155] Tf=2′-fluoro-5′-methyluridine-3′-phosphate
[0156] Tfs=2′-fluoro-5′-methyluridine-3′-phosphorothioate
[0157] Uf=2′-fluorouridine-3′-phosphate
[0158] Ufs=2′-fluorouridine-3′-phosphorothioate
[0159] dT=2′-deoxythymidine-3′-phosphate
[0160] A_{UNA}=2′,3′-seco-adenosine-3′-phosphate
[0161] A_{UNAS}=2′,3′-seco-adenosine-3′-phosphorothioate
[0162] C_{UNA}=2′,3′-seco-cytidine-3′-phosphate
[0163] C_{UNAS}=2′,3′-seco-cytidine-3′-phosphorothioate
[0164] G_{UNA}=2′,3′-seco-guanosine-3′-phosphate
[0165] G_{UNAS}=2′,3′-seco-guanosine-3′-phosphorothioate
[0166] U_{UNA}=2′,3′-seco-uridine-3′-phosphate
[0167] U_{UNAS}=2′,3′-seco-uridine-3′-phosphorothioate
[0168] a_2N=see Table 12
[0169] a_2Ns=see Table 12
[0170] (invAb)=inverted abasic deoxyribonucleotide-5′-phosphate, see Table 12
[0171] (invAb)s=inverted abasic deoxyribonucleotide-5′-phosphorothioate, see Table 12
[0172] s=phosphorothioate linkage
[0173] p=terminal phosphate (as synthesized)
[0174] vpdN=vinyl phosphonate deoxyribonucleotide
[0175] cPrpa=5′-cyclopropyl phosphonate-2′-O-methyladenosine-3′-phosphate (see Table 12)
[0176] cPrpas=5′-cyclopropyl phosphonate-2′-O-methyladenosine-3′-phosphorothioate (see Table 12)
[0177] cPrpu=5′-cyclopropyl phosphonate-2′-O-methyluridine-3′-phosphate (see Table 12)
[0178] cPrpus=5′-cyclopropyl phosphonate-2′-O-methyluridine-3′-phosphorothioate (see Table 12)
[0179] (Alk-SS-C6)=see Table 12
[0180] (C6-SS-Alk)=see Table 12
[0181] (C6-SS-C6)=see Table 12
[0182] (6-SS-6)=see Table 12
[0183] (C6-SS-Alk-Me)=see Table 12
[0184] (NH2-C6)=see Table 12
[0185] (TriAlk14)=see Table 12
[0186] (TriAlk14)s=see Table 12
[0187] —C6-=see Table 12
[0188] —C6s-=see Table 12
[0189] -L6-C6-=see Table 12
[0190] -L6-C6s-=see Table 12
[0191] -Alk-cyHex-=see Table 12
[0192] -Alk-cyHexs-=see Table 12
[0193] (TA14)=see Table 12 (structure of (TriAlk14)s after conjugation)
[0194] (TA14)s=see Table 12 (structure of (TriAlk14)s after conjugation)

[0195] As the person of ordinary skill in the art would readily understand, unless otherwise indicated by the sequence (such as, for example, by a phosphorothioate linkage “s”), when present in an oligonucleotide, the nucleotide monomers are mutually linked by 5′-3′-phosphodiester bonds. As the person of ordinary skill in the art would clearly understand, the inclusion of a phosphorothioate linkage as shown in the modified nucleotide sequences disclosed herein replaces the phosphodiester linkage typically present in oligonucleotides. Further, the person of ordinary skill in the art would readily understand that the terminal nucleotide at the 3′ end of a given oligonucleotide sequence would typically have a hydroxyl (—OH) group at the respective 3′ position of the given monomer instead of a phosphate moiety ex vivo. Additionally, for the embodiments disclosed herein, when viewing the respective strand 5′→3′, the inverted abasic residues are inserted such that the 3′ position of the deoxyribose is linked at the 3′ end of the preceding monomer on the respective strand (see, e.g., Table 12). Moreover, as the person of ordinary skill would readily understand and appreciate, while the phosphorothioate chemical structures depicted herein typically show the anion on the sulfur atom, the inventions disclosed herein encompass all phosphorothioate tautomers (e.g., where the sulfur atom has a double-bond and the anion is on an oxygen atom). Unless expressly indicated otherwise herein, such understandings of the person of ordinary skill in the art are used when describing the MUC5AC RNAi agents and compositions of MUC5AC RNAi agents disclosed herein.

[0196] Certain examples of targeting groups and linking groups used with the MUC5AC RNAi agents disclosed herein are included in the chemical structures provided below in Table 12. Each sense strand and/or antisense strand disclosed herein can have any targeting groups or linking groups listed herein, as well as other targeting or linking groups, conjugated to the 5′ and/or 3′ end of the sequence.

TABLE 3
MUC5AC RNAi Agent Antisense Strand Sequences

| | | | Underlying Base | |
|---|---|---|---|---|
| | | SEQ | Sequence (5′→3′) | SEQ |
| AS | | ID | (Shown as an Unmodified | ID |
| Strand ID | Modified Antisense Strand (5′→3′) | NO. | Nucleotide Sequence) | NO. |
| AM10579-AS | usUfsusGfaUfgGfcCfuUfgGfaGfcAfgGfsu | 1057 | UUUGAUGGCCUUGGAGCAGGU | 1517 |
| AM10581-AS | asAfsusCfuUfgAfuGfgCfcUfuGfgAfgCfsa | 1058 | AAUCUUGAUGGCCUUGGAGCA | 1518 |
| AM10583-AS | usUfsusGfaAfcUfcGfgGfgCfuGfaGfgUfsu | 1059 | UUUGAACUCGGGGCUGAGGUU | 1519 |
| AM10585-AS | usGfsasUfgCfuGfcAfcUfgCfuUfcUfgGfsg | 1060 | UGAUGCUGCACUGCUUCUGGG | 1520 |
| AM10587-AS | usUfsasGfuCfgCfaGfaAfcAfgAfgGfgCfsa | 1061 | UUAGUCGCAGAACAGAGGGCA | 1521 |
| AM10589-AS | asGfsusAfgUfcGfcAfgAfaCfaGfaGfgGfsc | 1062 | AGUAGUCGCAGAACAGAGGGC | 1522 |
| AM10591-AS | usUfsasGfuAfgUfcGfcAfgAfaCfaGfaGfsg | 1063 | UUAGUAGUCGCAGAACAGAGG | 1523 |
| AM10593-AS | usGfsusAfgUfaGfuCfgCfaGfaAfcAfgAfsg | 1064 | UGUAGUAGUCGCAGAACAGAG | 1524 |
| AM10595-AS | usUfsgsUfaGfuAfgUfcGfcAfgAfaCfaGfsc | 1065 | UUGUAGUAGUCGCAGAACAGC | 1525 |
| AM10597-AS | asUfsasGfuUfgUfaGfcAfgAfuGfgGfuGfsg | 1066 | AUAGUUGUAGCAGAUGGGUGG | 1526 |
| AM10599-AS | usUfscsCfaCfgUfcGfaAfcCfaCfuUfuGfsc | 1067 | UUCCACGUCGAACCACUUUGC | 1527 |
| AM10601-AS | usAfsasGfuCfcAfcGfuCfgAfaCfcAfcUfsc | 1068 | UAAGUCCACGUCGAACCACUC | 1528 |
| AM10603-AS | usGfsgsAfaGfuCfcAfcGfuCfgAfaCfcAfsc | 1069 | UGGAAGUCCACGUCGAACCAC | 1529 |
| AM10605-AS | usGfsgsAfaGfU_{UNA}CfcAfcGfuCfgAfaCfcAfsc | 1070 | UGGAAGUCCACGUCGAACCAC | 1529 |
| AM10739-AS | cPrpasAfsgsGfuCfuUfgUfaGfuGfgAfaGfcUfsg | 1071 | AAGGUCUUGUAGUGGAAGCUG | 1530 |
| AM10741-AS | cPrpasAfsgsGfuCfU_{UNA}UfgUfaGfuGfgAfaGfcUfsg | 1072 | AAGGUCUUGUAGUGGAAGCUG | 1530 |
| AM10743-AS | cPrpusAfscsCfaGfuGfcUfgAfgCfaUfaCfuUfsc | 1073 | UACCAGUGCUGAGCAUACUUC | 1531 |
| AM10744-AS | cPrpusAfscsCfaGfU_{UNA}GfcUfgAfgCfaUfaCfuUfsc | 1074 | UACCAGUGCUGAGCAUACUUC | 1531 |
| AM10747-AS | cPrpusUfsusGfaAfgguguUfgAfaGfaAfgGfsc | 1075 | UUUGAAGGUGUUGAAGAAGGC | 1532 |
| AM10764-AS | asGfsasUfgCfuGfgUfcUfuCfuUfgUfcCfsc | 1076 | AGAUGCUGGUCUUCUUGUCCC | 1533 |
| AM10766-AS | usGfsusUfgAfuGfaAfgAfuGfcUfgGfuCfsc | 1077 | UGUUGAUGAAGAUGCUGGUCC | 1534 |
| AM10768-AS | usUfscsUfuGfuUfcAfgGfcAfaAfuCfaGfsc | 1078 | UUCUUGUUCAGGCAAAUCAGC | 1535 |
| AM10770-AS | asUfsgsUfuGfuUfgUfaGfgUfuUfcCfuUfsg | 1079 | AUGUUGUUGUAGGUUUCCUUG | 1536 |
| AM10772-AS | asUfsgsAfuGfuUfgUfuGfuAfgGfuUfuCfsc | 1080 | AUGAUGUUGUUGUAGGUUUCC | 1537 |
| AM10790-AS | usUfsgsAfuGfaAfgAfuGfcUfgGfuCfuUfsc | 1081 | UUGAUGAAGAUGCUGGUCUUC | 1538 |
| AM10792-AS | usGfsasUfcUfgGfuAfgUfuGfuAfgCfaGfsc | 1082 | UGAUCUGGUAGUUGUAGCAGC | 1539 |
| AM10794-AS | usCfscsUfgAfuCfuGfgUfaGfuUfgUfaGfsc | 1083 | UCCUGAUCUGGUAGUUGUAGC | 1540 |
| AM10796-AS | usAfsgsUfuGfuAfgCfaGfaUfgGfgUfgGfsg | 1084 | UAGUUGUAGCAGAUGGGUGGG | 1541 |
| AM10798-AS | usCfsasAfcAfcUfgGfaUfgCfgGfaUfcUfsc | 1085 | UCAACACUGGAUGCGGAUCUC | 1542 |
| AM10800-AS | usUfsgsUfuCfgAfuGfcUfcAfcCfuCfuGfsg | 1086 | UUGUUCGAUGCUCACCUCUGG | 1543 |
| AM10802-AS | usAfsusCfuUfgAfaGfgGfuCfcCfuGfcUfsg | 1087 | UAUCUUGAAGGGUCCCUGCUG | 1544 |
| AM10804-AS | usCfsgsUfaGfuUfgAfgGfcAfcAfuCfuUfsg | 1088 | UCGUAGUUGAGGCACAUCUUG | 1545 |
| AM10806-AS | usCfsusCfgUfaGfuUfgAfgGfcAfcAfuCfsc | 1089 | UCUCGUAGUUGAGGCACAUCC | 1546 |
| AM10808-AS | asAfsgsGfuCfuUfgUfaGfuGfgAfaGfcUfsg | 1090 | AAGGUCUUGUAGUGGAAGCUG | 1530 |
| AM10810-AS | usUfsusCfaGfgCfaGfgUfcUfcGfcUfgUfsc | 1091 | UUUCAGGCAGGUCUCGCUGUC | 1547 |
| AM10812-AS | usUfscsUfgAfaGfaUfgGfuGfaCfgUfuGfsg | 1092 | UUCUGAAGAUGGUGACGUUGG | 1548 |
| AM10814-AS | usGfsusCfuGfaAfgAfuGfgUfgAfcGfuUfsg | 1093 | UGUCUGAAGAUGGUGACGUUG | 1549 |
| AM10816-AS | usGfsgsAfaGfU_{UNA}CfaUfcGfgCfcUfgGfaUfsg | 1094 | UGGAAGUCAUCGGCCUGGAUG | 1550 |
| AM10818-AS | usUfsusGfaAfgguguUfgAfaGfaAfgGfsc | 1095 | UUUGAAGGUGUUGAAGAAGGC | 1532 |
| AM10821-AS | usGfscsAfgUfuCfgAfgUfaGfuAfgGfuUfsc | 1096 | UGCAGUUCGAGUAGUAGGUUC | 1551 |
| AM10823-AS | usUfsusGfgAfgCfaGfgUfgGfuCfcCfuGfsu | 1097 | UUUGGAGCAGGUGGUCCCUGU | 1552 |
| AM10825-AS | usCfsusUfgAfuGfgCfcUfuGfgAfgCfaGfsg | 1098 | UCUUGAUGGCCUUGGAGCAGG | 1553 |
| AM10827-AS | usUfsgsUfcAfuCfgUfgGfuUfcCfaCfaUfsg | 1099 | UUGUCAUCGUGGUUCCACAUG | 1554 |
| AM10829-AS | asCfsasGfaAfgCfaGfaGfgUfcUfuGfcCfsu | 1100 | ACAGAAGCAGAGGUCUUGCCU | 1555 |
| AM10831-AS | usCfsasGfuUfgGfuGfcAfgUfcUfgUfgGfsa | 1101 | UCAGUUGGUGCAGUCUGUGGA | 1556 |
| AM10833-AS | usCfsasGfuAfcAfgUfgAfaGfgCfaCfuGfsc | 1102 | UCAGUACAGUGAAGGCACUGC | 1557 |
| AM10835-AS | usGfscsUfgUfuGfaAfgUfuCfcCfaCfaGfsc | 1103 | UGCUGUUGAAGUUCCCACAGC | 1558 |
| AM10837-AS | usGfsasUfgCfuGfuUfgAfaGfuUfcCfcAfsc | 1104 | UGAUGCUGUUGAAGUUCCCAC | 1559 |
| AM10839-AS | usGfsgsUfcUfuGfaAfgGfuGfuUfgAfaGfsc | 1105 | UGGUCUUGAAGGUGUUGAAGC | 1560 |
| AM10841-AS | asAfsgsCfuGfuUfcCfuGfaUfgUfuGfgGfsg | 1106 | AAGCUGUUCCUGAUGUUGGGG | 1561 |
| AM10843-AS | asCfsasUfgCfaGfuUfcGfaGfuAfgUfaGfsg | 1107 | ACAUGCAGUUCGAGUAGUAGG | 1562 |
| AM10845-AS | usAfsasGfcCfaAfcAfcUfgCfaGfgUfgAfsc | 1108 | UAAGCCAACACUGCAGGUGAC | 1563 |
| AM10847-AS | usUfsgsUfaAfcAfgGfuCfaUfgUfcCfaGfsc | 1109 | UUGUAACAGGUCAUGUCCAGC | 1564 |
| AM10849-AS | usCfsgsUfuGfaAfgCfuGfuAfgCfuCfuGfsc | 1110 | UCGUUGAAGCUGUAGCUCUGC | 1565 |
| AM11065-AS | usAfscsCfaGfU_{UNA}GfcUfgAfgCfaUfaCfuUfsc | 1111 | UACCAGUGCUGAGCAUACUUC | 1531 |
| AM11264-AS | cPrpusGfsgsAfuCfuCfaUfaGfuUfgUfaGfcAfsg | 1112 | UGGAUCUCAUAGUUGUAGCAG | 1566 |
| AM11266-AS | cPrpusGfsgsAfuCfU_{UNA}CfaUfaGfuUfgUfaGfcAfsg | 1113 | UGGAUCUCAUAGUUGUAGCAG | 1566 |
| AM11268-AS | cPrpusGfsusCfaAfaCfcAfcUfuGfgUfcCfaGfsg | 1114 | UGUCAAACCACUUGGUCCAGG | 1567 |
| AM11271-AS | cPrpusUfsgsUfuGfuUfgAfaGfaUfgAfuCfuCfsg | 1115 | UUGUUGUUGAAGAUGAUCUCG | 1568 |
| AM11272-AS | cPrpusUfsgsUfuguugaaGfaUfgAfucucsg | 1116 | UUGUUGUUGAAGAUGAUCUCG | 1568 |
| AM11275-AS | usAfsgsUfaCfaGfuGfaAfgGfcAfcUfgCfsu | 1117 | UAGUACAGUGAAGGCACUGCU | 1569 |
| AM11277-AS | usUfscsGfaAfgCfuGfuUfcCfuGfaUfgUfsc | 1118 | UUCGAAGCUGUUCCUGAUGUC | 1570 |
| AM11279-AS | usCfsusUfgUfuCfaGfgCfaAfaUfcAfgCfsc | 1119 | UCUUGUUCAGGCAAAUCAGCC | 1571 |
| AM11281-AS | usCfsasCfcAfaAfgUfgGfuUfgUfcCfuGfsg | 1120 | UCACCAAAGUGGUUGUCCUGG | 1572 |
| AM11283-AS | usAfsgsCfaGfaGfgUfuGfuUfcUfgGfuUfsg | 1121 | UAGCAGAGGUUGUUCUGGUUG | 1573 |
| AM11285-AS | usAfsgsAfuUfgUfgCfuGfgUfuGfuAfgCfsg | 1122 | UAGAUUGUGCUGGUUGUAGCG | 1574 |
| AM11287-AS | usAfsgsAfaGfuUfgUfgCfuGfgUfuGfuGfsg | 1123 | UAGAAGUUGUGCUGGUUGUGG | 1575 |
| AM11289-AS | usUfsusGfuCfaCfcAfaAfgUfgGfuUfgUfsc | 1124 | UUUGUCACCAAAGUGGUUGUC | 1576 |
| AM11291-AS | usAfsgsAfgGfuUfgUfgUfuGfgUfuGfuAfsg | 1125 | UAGAGGUUGUGUUGGUUGUAG | 1577 |
| AM11293-AS | usCfsusAfgUfuGfuAfgGfaGfcAfgAfgGfsu | 1126 | UCUAGUUGUAGGAGCAGAGGU | 1578 |
| AM11401-AS | cPrpusUfsgsUfaGfuAfgUfcGfcAfgAfaCfaGfsc | 1127 | UUGUAGUAGUCGCAGAACAGC | 1525 |
| AM11403-AS | usUfsgsUfaGfuAfgUfcAfcAfgAfaCfaGfsc | 1128 | UUGUAGUAGUCACAGAACAGC | 1579 |
| AM11404-AS | cPrpusUfsgsUfaGfuAfgUfcAfcAfgAfaCfaGfsc | 1129 | UUGUAGUAGUCACAGAACAGC | 1579 |
| AM11405-AS | cPrpusUfsgsuaguagucAfcAfgAfacagsc | 1130 | UUGUAGUAGUCACAGAACAGC | 1579 |
| AM11462-AS | cPrpusCfsasuaguuguaGfcAfcAfugggsu | 1131 | UCAUAGUUGUAGCACAUGGGU | 1580 |
| AM11464-AS | cPrpusGfsusUfgUfuGfaAfgAfuGfaUfcUfgGfsu | 1132 | UGUUGUUGAAGAUGAUCUGGU | 1581 |
| AM11465-AS | cPrpusGfsusuguugaagAfuGfaUfcuggsu | 1133 | UGUUGUUGAAGAUGAUCUGGU | 1581 |
| AM11467-AS | cPrpusGfsusUfgAfaGfuUfaCfcAfcAfgAfgCfsc | 1134 | UGUUGAAGUUACCACAGAGCC | 1582 |
| AM11469-AS | cPrpusAfscsUfuUfuCfaUfuCfuCfcAfcGfcUfsc | 1135 | UACUUUUCAUUCUCCACGCUC | 1583 |
| AM11471-AS | cPrpusAfsgsCfaUfaCfuUfuUfcAfuUfcUfcCfsc | 1136 | UAGCAUACUUUUCAUUCUCCC | 1584 |
| AM11473-AS | cPrpusCfsasUfaCfaUfgCfaGfuUfcGfaGfaAfsg | 1137 | UCAUACAUGCAGUUCGAGAAG | 1585 |
| AM11475-AS | cPrpusGfsusCfaUfaCfaUfgCfaGfuUfcGfaGfsc | 1138 | UGUCAUACAUGCAGUUCGAGC | 1586 |
| AM11477-AS | cPrpusUfsgsUfcAfuAfcAfuGfcAfgUfuCfgAfsg | 1139 | UUGUCAUACAUGCAGUUCGAG | 1587 |
| AM11479-AS | cPrpusUfsasGfuAfgUfcAfcAfgAfaCfaGfuGfsg | 1140 | UUAGUAGUCACAGAACAGUGG | 1588 |
| AM11481-AS | cPrpusGfsusAfgUfaGfuCfaCfaGfaAfcAfgUfsg | 1141 | UGUAGUAGUCACAGAACAGUG | 1589 |
| AM11495-AS | cPrpusUfsgsUfaGfuAfgUfcicAfgAfaCfaGfsc | 1142 | UUGUAGUAGUCICAGAACAGC | 1590 |
| AM11496-AS | cPrpusUfsgsUfaGfuAfgUfcgcAfgAfaCfaGfsc | 1143 | UUGUAGUAGUCGCAGAACAGC | 1525 |
| AM11498-AS | asCfsasUfgCfaGfuUfcGfaGfaAfgAfaGfsg | 1144 | ACAUGCAGUUCGAGAAGAAGG | 1591 |
| AM11499-AS | cPrpasCfsasUfgCfaGfuUfcGfaGfaAfgAfaGfsg | 1145 | ACAUGCAGUUCGAGAAGAAGG | 1591 |
| AM11740-AS | cPrpasUfsasGfuUfgUfaGfcAfcAfuGfgGfuGfsg | 1146 | AUAGUUGUAGCACAUGGGUGG | 1592 |
| AM11741-AS | cPrpasUfsasguuguagcAfcAfuGfggugsg | 1147 | AUAGUUGUAGCACAUGGGUGG | 1592 |
| AM11742-AS | cPrpusGfsgsaucucauaGfuUfgUfagcasg | 1148 | UGGAUCUCAUAGUUGUAGCAG | 1566 |
| AM11745-AS | cPrpusUfsgsuuguugaaGfaUfgAfucucsg | 1149 | UUGUUGUUGAAGAUGAUCUCG | 1568 |
| AM11821-AS | cPrpusGfsusAfguagucaCfaGfaAfcagusg | 1150 | UGUAGUAGUCACAGAACAGUG | 1589 |
| AM11823-AS | cPrpusGfsusaguagucaCfaGfaAfcagusg | 1151 | UGUAGUAGUCACAGAACAGUG | 1589 |
| AM11825-AS | cPrpusGfsusaguagucaCfaGfaAfcagusc | 1152 | UGUAGUAGUCACAGAACAGUG | 1593 |
| AM11971-AS | usGfsgsUfuCfaGfgAfaCfaCfuUfcCfcCfsa | 1153 | UGGUUCAGGAACACUUCCCCA | 1594 |
| AM11973-AS | usCfsasAfcAfcUfgCfaGfgUfgAfuGfuCfsc | 1154 | UCAACACUGCAGGUGAUGUCC | 1595 |
| AM11975-AS | usAfsusGfuCfgUfcGfaAfgUfuCfcCfaCfsa | 1155 | UAUGUCGUCGAAGUUCCCACA | 1596 |
| AM11977-AS | usAfsusCfuUfgUfcCfuCfaUfcAfaAfgAfsc | 1156 | UAUCUUGUCCUCAUCAAAGAC | 1597 |
| AM11979-AS | usUfscsGfuGfuGfgUfaGfaUfgAfcGfuCfsc | 1157 | UUCGUGUGGUAGAUGACGUCC | 1598 |
| AM11982-AS | asUfsusUfcUfgCfcAfaGfaGfgAfgGfuGfsc | 1158 | AUUUCUGCCAAGAGGAGGUGC | 1599 |
| AM11984-AS | usGfsusUfgUfuGfaAfgAfuGfaUfcUfcGfsu | 1159 | UGUUGUUGAAGAUGAUCUCGU | 1600 |
| AM11986-AS | usUfsgsUfuguugaaGfaUfgAfucucsg | 1160 | UUGUUGUUGAAGAUGAUCUCG | 1568 |
| AM12158-AS | usGfsusUfgUfuGfuAfgGfuUfuCfcUfuGfsc | 1161 | UGUUGUUGUAGGUUUCCUUGC | 1601 |
| AM12159-AS | cPrpusGfsusUfgUfuGfuAfgGfuUfuCfcUfuGfsc | 1162 | UGUUGUUGUAGGUUUCCUUGC | 1601 |
| AM12161-AS | usGfsusuguuguagGfuUfuCfcuugsc | 1163 | UGUUGUUGUAGGUUUCCUUGC | 1601 |
| AM12162-AS | cPrpusGfsusuguuguagGfuUfuCfcuugsc | 1164 | UGUUGUUGUAGGUUUCCUUGC | 1601 |
| AM12163-AS | cPrpusUfscsUfuGfuUfcAfgGfcAfaAfuCfaGfsc | 1165 | UUCUUGUUCAGGCAAAUCAGC | 1535 |
| AM12165-AS | usUfscsuuguucagGfcAfaAfucagsc | 1166 | UUCUUGUUCAGGCAAAUCAGC | 1535 |
| AM12166-AS | cPrpusUfscsuuguucagGfcAfaAfucagsc | 1167 | UUCUUGUUCAGGCAAAUCAGC | 1535 |
| AM12167-AS | cPrpusUfscsuugU_{UNA}UcagGfcAfaAfucagsc | 1168 | UUCUUGUUCAGGCAAAUCAGC | 1535 |
| AM12169-AS | cPrpusCfsusUfgUfuCfaGfgCfaAfaUfcAfgCfsc | 1169 | UCUUGUUCAGGCAAAUCAGCC | 1571 |
| AM12171-AS | usCfsusuguucaggCfaAfaUfcagcsc | 1170 | UCUUGUUCAGGCAAAUCAGCC | 1571 |
| AM12172-AS | cPrpusCfsusuguucaggCfaAfaUfcagcsc | 1171 | UCUUGUUCAGGCAAAUCAGCC | 1571 |
| AM12173-AS | cPrpusGfsusUfgAfuGfaAfgAfuGfcUfgGfuCfsc | 1172 | UGUUGAUGAAGAUGCUGGUCC | 1534 |
| AM12175-AS | usGfsusugaugaagAfuGfcUfggucsc | 1173 | UGUUGAUGAAGAUGCUGGUCC | 1534 |
| AM12176-AS | cPrpusGfsusugaugaagAfuGfcUfggucsc | 1174 | UGUUGAUGAAGAUGCUGGUCC | 1534 |
| AM12177-AS | cPrpusGfsusugaU_{UNA}gaagAfuGfcUfggucsc | 1175 | UGUUGAUGAAGAUGCUGGUCC | 1534 |
| AM12178-AS | cPrpusUfsgsUfugU_{UNA}UgaaGfaUfgAfucucsg | 1176 | UUGUUGUUGAAGAUGAUCUCG | 1568 |
| AM12180-AS | cPrpusUfsgsUfuguU_{UNA}gaaGfaUfgAfucucsg | 1177 | UUGUUGUUGAAGAUGAUCUCG | 1568 |
| AM12181-AS | cPrpusUfsgsUfU_{UNA}guugaaGfaUfgAfucucsg | 1178 | UUGUUGUUGAAGAUGAUCUCG | 1568 |
| AM12182-AS | cPrpusUfsgsiuguugaaGfaUfgAfucucsg | 1179 | UUGIUGUUGAAGAUGAUCUCG | 1602 |
| AM12189-AS | asUfscsUfuGfuCfcUfcAfuCfaAfaGfaUfsg | 1180 | AUCUUGUCCUCAUCAAAGAUG | 1603 |
| AM12191-AS | usCfsasUfcUfuGfuCfcUfcAfuCfaAfaGfsc | 1181 | UCAUCUUGUCCUCAUCAAAGC | 1604 |
| AM12193-AS | usCfsusAfgUfuGfuAfgGfaGfcAfgAfgAfsc | 1182 | UCUAGUUGUAGGAGCAGAGAC | 1605 |
| AM12195-AS | usAfsgsUfuGfuAfgAfaGfcAfgAfgGfuUfsg | 1183 | UAGUUGUAGAAGCAGAGGUUG | 1606 |
| AM12197-AS | usAfsgsAfaGfuUfgUfgCfuGfgUfuAfuAfsg | 1184 | UAGAAGUUGUGCUGGUUAUAG | 1607 |
| AM12516-AS | usUfsgsuaguagucGfcAfgAfacagsc | 1185 | UUGUAGUAGUCGCAGAACAGC | 1525 |
| AM12519-AS | usUfsgsuagU_{UNA}agucGfcAfgAfacagsc | 1186 | UUGUAGUAGUCGCAGAACAGC | 1525 |
| AM12608-AS | usUfscsuuguucagGfcAfaAfucagsg | 1187 | UUCUUGUUCAGGCAAAUCAGG | 1608 |
| AM12609-AS | usUfscsuuGfuucagGfcAfaAfucagsc | 1188 | UUCUUGUUCAGGCAAAUCAGC | 1535 |
| AM12610-AS | usUfscsUfuguucagGfcAfaAfucagsc | 1189 | UUCUUGUUCAGGCAAAUCAGC | 1535 |
| AM12611-AS | usUfscsuuguU_{UNA}cagGfcAfaAfucagsc | 1190 | UUCUUGUUCAGGCAAAUCAGC | 1535 |
| AM12612-AS | cPrpuUfcuuguucagGfcAfaAfucagsc | 1191 | UUCUUGUUCAGGCAAAUCAGC | 1535 |
| AM08569-AS | usGfsgsAfuCfuCfaUfaGfuUfgUfaGfcAfsg | 1716 | UGGAUCUCAUAGUUGUAGCAG | 1566 |
| AM07104-AS | usUfsgsUfuGfuUfgAfaGfaUfgAfuCfuCfsg | 1717 | UUGUUGUUGAAGAUGAUCUCG | 1568 |

TABLE 4
MUC5AC Agent Sense Strand Sequences
(Shown Without Linkers, Conjugates, or Capping Moieties)

| | | | Underlying Base | |
|---|---|---|---|---|
| | | SEQ | Sequence (5′→3′) | SEQ |
| | Modified | ID | (Shown as an Unmodified | ID |
| Strand ID | Sense Strand (5′→3′) | NO. | Nucleotide Sequence) | NO. |
| AM10578-SS-NL | asccugcucCfAfAfgiccaucaaa | 1192 | ACCUGCUCCAAGICCAUCAAA | 1609 |
| AM10580-SS-NL | usgcuccaaGfGfCfcaucaagauu | 1193 | UGCUCCAAGGCCAUCAAGAUU | 1610 |
| AM10582-SS-NL | asaccucagCfUfCfcgaguucaaa | 1194 | AACCUCAGCUCCGAGUUCAAA | 1611 |
| AM10584-SS-NL | csccagaagCfAfGfugcaicauca | 1195 | CCCAGAAGCAGUGCAICAUCA | 1612 |
| AM10586-SS-NL | usgcccucuGfUfUfcugciacuaa | 1196 | UGCCCUCUGUUCUGCIACUAA | 1613 |
| AM10588-SS-NL | gscccucugUfUfCfuicgacuacu | 1197 | GCCCUCUGUUCUICGACUACU | 1614 |
| AM10590-SS-NL | cscucuguuCfUfGfcgacuacuaa | 1198 | CCUCUGUUCUGCGACUACUAA | 1615 |
| AM10592-SS-NL | csucuguucUfGfCfgacuacuaca | 1199 | CUCUGUUCUGCGACUACUACA | 1616 |
| AM10594-SS-NL | gscuguucuGfCfGfacuacuacaa | 1200 | GCUGUUCUGCGACUACUACAA | 1617 |
| AM10596-SS-NL | cscacccauCfUfGfcuacaacuau | 1201 | CCACCCAUCUGCUACAACUAU | 1618 |
| AM10598-SS-NL | gscaaagugGfUfUfcgaciuggaa | 1202 | GCAAAGUGGUUCGACIUGGAA | 1619 |
| AM10600-SS-NL | gsagugguuCfGfAfcgugiacuua | 1203 | GAGUGGUUCGACGUGIACUUA | 1620 |
| AM10602-SS-NL | gsugguucgAfCfGfugiacuucca | 1204 | GUGGUUCGACGUGIACUUCCA | 1621 |
| AM10604-SS-NL | gsugguucgAfCfGfuggacuucca | 1205 | GUGGUUCGACGUGGACUUCCA | 1622 |
| AM10738-SS-NL | csagcuuccAfCfUfacaaiaccuu | 1206 | CAGCUUCCACUACAAIACCUU | 1623 |
| AM10740-SS-NL | csagcuuccAfCfUfacaagaccuu | 1207 | CAGCUUCCACUACAAGACCUU | 1624 |
| AM10742-SS-NL | gsa_2NaguaugCfUfCfagcacugiua | 1208 | G(A^{2N})AGUAUGCUCAGCACUGIUA | 1625 |
| AM10745-SS-NL | gsa_2NaguaugCfUfCfaguacugiua | 1209 | G(A^{2N})AGUAUGCUCAGUACUGIUA | 1626 |
| AM10746-SS-NL | gsccuucuuCfAfAfcaccuucaaa | 1210 | GCCUUCUUCAACACCUUCAAA | 1627 |
| AM10748-SS-NL | gsccuucuuCfAfAfcaucuucaaa | 1211 | GCCUUCUUCAACAUCUUCAAA | 1628 |
| AM10749-SS-NL | gsccuucuuCfAfAfcacuuucaaa | 1212 | GCCUUCUUCAACACUUUCAAA | 1629 |
| AM10763-SS-NL | gsggacaagAfAfGfaccaicaucu | 1213 | GGGACAAGAAGACCAICAUCU | 1630 |
| AM10765-SS-NL | gsgaccagcAfUfCfuucaucaaca | 1214 | GGACCAGCAUCUUCAUCAACA | 1631 |
| AM10767-SS-NL | gscugauuuGfCfCfugaacaagaa | 1215 | GCUGAUUUGCCUGAACAAGAA | 1632 |
| AM10769-SS-NL | csa_2NaggaaaCfCfUfacaacaacau | 1216 | C(A^{2N})AGGAAACCUACAACAACAU | 1633 |
| AM10771-SS-NL | gsgaaaccuAfCfAfacaacaucau | 1217 | GGAAACCUACAACAACAUCAU | 1634 |
| AM10789-SS-NL | gsa_2NagaccaGfCfAfucuucaucaa | 1218 | G(A^{2N})AGACCAGCAUCUUCAUCAA | 1635 |
| AM10791-SS-NL | gscugcuacAfAfCfuaccaiauca | 1219 | GCUGCUACAACUACCAIAUCA | 1636 |
| AM10793-SS-NL | gscuacaacUfAfCfcagaucaiga | 1220 | GCUACAACUACCAGAUCAIGA | 1637 |
| AM10795-SS-NL | csccacccaUfCfUfgcuacaacua | 1221 | CCCACCCAUCUGCUACAACUA | 1638 |
| AM10797-SS-NL | gsagauccgCfAfUfccaguiuuga | 1222 | GAGAUCCGCAUCCAGUIUUGA | 1639 |
| AM10799-SS-NL | cscagagguGfAfGfcauciaacaa | 1223 | CCAGAGGUGAGCAUCIAACAA | 1640 |
| AM10801-SS-NL | csagcagggAfCfCfcuucaagaua | 1224 | CAGCAGGGACCCUUCAAGAUA | 1641 |
| AM10803-SS-NL | csa_2NagauguGfCfCfucaacuacia | 1225 | C(A^{2N})AGAUGUGCCUCAACUACIA | 1642 |
| AM10805-SS-NL | gsgaugugcCfUfCfaacuaciaga | 1226 | GGAUGUGCCUCAACUACIAGA | 1643 |
| AM10807-SS-NL | csagcuuccAfCfUfacaaiaccuu | 1227 | CAGCUUCCACUACAAIACCUU | 1623 |
| AM10809-SS-NL | gsacagcgaGfAfCfcugcuugaaa | 1228 | GACAGCGAGACCUGCUUGAAA | 1644 |
| AM10811-SS-NL | cscaacgucAfCfCfaucuucagaa | 1229 | CCAACGUCACCAUCUUCAGAA | 1645 |
| AM10813-SS-NL | csa_2NacgucaCfCfAfucuucaiaca | 1230 | C(A^{2N})ACGUCACCAUCUUCAIACA | 1646 |
| AM10815-SS-NL | csauccaggCfCfGfaugacuucca | 1231 | CAUCCAGGCCGAUGACUUCCA | 1647 |
| AM10817-SS-NL | gsccuucuuCfAfAfcaccuucaaa | 1232 | GCCUUCUUCAACACCUUCAAA | 1627 |
| AM10819-SS-NL | gsa_2NaguaugCfUfCfagcacugiua | 1233 | G(A^{2N})AGUAUGCUCAGCACUGIUA | 1625 |
| AM10820-SS-NL | gsa_2NaccuacUfAfCfucgaacuica | 1234 | G(A^{2N})ACCUACUACUCGAACUICA | 1648 |
| AM10822-SS-NL | ascagggacCfAfCfcugcuucaaa | 1235 | ACAGGGACCACCUGCUUCAAA | 1649 |
| AM10824-SS-NL | cscugcuccAfAfGfgcuaucaaga | 1236 | CCUGCUCCAAGGCUAUCAAGA | 1650 |
| AM10826-SS-NL | csa_2NuguggaAfCfCfacgauiacaa | 1237 | C(A^{2N})UGUGGAACCACGAUIACAA | 1651 |
| AM10828-SS-NL | asggcaagaCfCfUfcugcuucuiu | 1238 | AGGCAAGACCUCUGCUUCUIU | 1652 |
| AM10830-SS-NL | usccacagaCfUfGfcaccaacuia | 1239 | UCCACAGACUGCACCAACUIA | 1653 |
| AM10832-SS-NL | gscagugccUfUfCfacuguacuia | 1240 | GCAGUGCCUUCACUGUACUIA | 1654 |
| AM10834-SS-NL | gscugugggAfAfCfuucaacaica | 1241 | GCUGUGGGAACUUCAACAICA | 1655 |
| AM10836-SS-NL | gsugggaacUfUfCfaacaicauca | 1242 | GUGGGAACUUCAACAICAUCA | 1656 |
| AM10838-SS-NL | gscuucaacAfCfCfuucaaiacca | 1243 | GCUUCAACACCUUCAAIACCA | 1657 |
| AM10840-SS-NL | cscccaacaUfCfAfggaacaicuu | 1244 | CCCCAACAUCAGGAACAICUU | 1658 |
| AM10842-SS-NL | cscuacuacUfCfGfaacuicaugu | 1245 | CCUACUACUCGAACUICAUGU | 1659 |
| AM10844-SS-NL | gsucaccugCfAfGfuguugicuua | 1246 | GUCACCUGCAGUGUUGICUUA | 1660 |
| AM10846-SS-NL | gscuggacaUfGfAfccuguuacaa | 1247 | GCUGGACAUGACCUGUUACAA | 1661 |
| AM10848-SS-NL | gscagagcuAfCfAfgcuucaacia | 1248 | GCAGAGCUACAGCUUCAACIA | 1662 |
| AM11066-SS-NL | gsa_2NaguaugCfUfCfaguacugiua | 1249 | G(A^{2N})AGUAUGCUCAGUACUGIUA | 1626 |
| AM11263-SS-NL | csugcuacaAfCfUfaugagaucca | 1250 | CUGCUACAACUAUGAGAUCCA | 1663 |
| AM11265-SS-NL | csugcuacaAfCfUfaugaiaucca | 1251 | CUGCUACAACUAUGAIAUCCA | 1664 |
| AM11267-SS-NL | cscuggaccAfAfGfugguuugaca | 1252 | CCUGGACCAAGUGGUUUGACA | 1665 |
| AM11269-SS-NL | cscuggaccAfAfGfugguuuiaca | 1253 | CCUGGACCAAGUGGUUUIACA | 1666 |
| AM11270-SS-NL | csgagaucaUfCfUfucaacaacaa | 1254 | CGAGAUCAUCUUCAACAACAA | 1667 |
| AM11274-SS-NL | asgcagugcCfUfUfcacuguacua | 1255 | AGCAGUGCCUUCACUGUACUA | 1668 |
| AM11276-SS-NL | gsacaucagGfAfAfcagcuuciaa | 1256 | GACAUCAGGAACAGCUUCIAA | 1669 |
| AM11278-SS-NL | gsgcugauuUfGfCfcugaacaaga | 1257 | GGCUGAUUUGCCUGAACAAGA | 1670 |
| AM11280-SS-NL | cscaggacaAfCfCfacuuuiguga | 1258 | CCAGGACAACCACUUUIGUGA | 1671 |
| AM11282-SS-NL | csaaccagaAfCfAfaccucuicua | 1259 | CAACCAGAACAACCUCUICUA | 1672 |
| AM11284-SS-NL | csgcuacaaCfCfAfgcacaaucua | 1260 | CGCUACAACCAGCACAAUCUA | 1673 |
| AM11286-SS-NL | cscacaaccAfGfCfacaacuucua | 1261 | CCACAACCAGCACAACUUCUA | 1674 |
| AM11288-SS-NL | gsacaaccaCfUfUfuggugacaaa | 1262 | GACAACCACUUUGGUGACAAA | 1675 |
| AM11290-SS-NL | csuacaaccAfAfCfacaacuucua | 1263 | CUACAACCAACACAACUUCUA | 1676 |
| AM11292-SS-NL | asccucugcUfCfCfuacaacuaga | 1264 | ACCUCUGCUCCUACAACUAGA | 1677 |
| AM11400-SS-NL | gscuguucuGfCfGfacuacuacaa | 1265 | GCUGUUCUGCGACUACUACAA | 1617 |
| AM11402-SS-NL | gscuguucuGfUfGfacuacuacaa | 1266 | GCUGUUCUGUGACUACUACAA | 1678 |
| AM11463-SS-NL | asccagaucAfUfCfuucaacaaca | 1267 | ACCAGAUCAUCUUCAACAACA | 1679 |
| AM11466-SS-NL | gsgcucuguGfGfUfaacuucaaca | 1268 | GGCUCUGUGGUAACUUCAACA | 1680 |
| AM11468-SS-NL | gsagcguggAfGfAfaugaaaagua | 1269 | GAGCGUGGAGAAUGAAAAGUA | 1681 |
| AM11470-SS-NL | gsggagaauGfAfAfaaguaugcua | 1270 | GGGAGAAUGAAAAGUAUGCUA | 1682 |
| AM11472-SS-NL | csuucucgaAfCfUfgcauguauga | 1271 | CUUCUCGAACUGCAUGUAUGA | 1683 |
| AM11474-SS-NL | gscucgaacUfGfCfauguaugaca | 1272 | GCUCGAACUGCAUGUAUGACA | 1684 |
| AM11476-SS-NL | csucgaacuGfCfAfuguaugacaa | 1273 | CUCGAACUGCAUGUAUGACAA | 1685 |
| AM11478-SS-NL | cscacuguuCfUfGfugacuacuaa | 1274 | CCACUGUUCUGUGACUACUAA | 1686 |
| AM11480-SS-NL | csacuguucUfGfUfgacuacuaca | 1275 | CACUGUUCUGUGACUACUACA | 1687 |
| AM11497-SS-NL | cscuucuucUfCfGfaacuicaugu | 1276 | CCUUCUUCUCGAACUICAUGU | 1688 |
| AM11739-SS-NL | cscacccauGfUfGfcuacaacuau | 1277 | CCACCCAUGUGCUACAACUAU | 1689 |
| AM11743-SS-NL | csugcuaCfaAfcUfaugaiaucca | 1278 | CUGCUACAACUAUGAIAUCCA | 1664 |
| AM11744-SS-NL | csgagauCfaUfcUfucaacaacaa | 1279 | CGAGAUCAUCUUCAACAACAA | 1667 |
| AM11822-SS-NL | csacuguUfcUfgUfgacuacuaca | 1280 | CACUGUUCUGUGACUACUACA | 1687 |
| AM11824-SS-NL | gsacuguUfcUfgUfgacuacuaca | 1281 | GACUGUUCUGUGACUACUACA | 1690 |
| AM11970-SS-NL | usggggaagUfGfUfuccuiaacca | 1282 | UGGGGAAGUGUUCCUIAACCA | 1691 |
| AM11972-SS-NL | gsgacaucaCfCfUfgcaguiuuga | 1283 | GGACAUCACCUGCAGUIUUGA | 1692 |
| AM11974-SS-NL | usgugggaaCfUfUfcgaciacaua | 1284 | UGUGGGAACUUCGACIACAUA | 1693 |
| AM11976-SS-NL | gsucuuugaUfGfAfggacaagaua | 1285 | GUCUUUGAUGAGGACAAGAUA | 1694 |
| AM11978-SS-NL | gsgacgucaUfCfUfaccacaciaa | 1286 | GGACGUCAUCUACCACACIAA | 1695 |
| AM11980-SS-NL | csugcuacaAfCfUfaugaiaucca | 1287 | CUGCUACAACUAUGAIAUCCA | 1664 |
| AM11981-SS-NL | gscaccuccUfCfUfugicagaaau | 1288 | GCACCUCCUCUUGICAGAAAU | 1696 |
| AM11983-SS-NL | ascgagaucAfUfCfuucaacaaca | 1289 | ACGAGAUCAUCUUCAACAACA | 1697 |
| AM11985-SS-NL | csgagaucaUfCfUfucaacaacaa | 1290 | CGAGAUCAUCUUCAACAACAA | 1667 |
| AM12157-SS-NL | gscaaggaaAfCfCfuacaacaaca | 1291 | GCAAGGAAACCUACAACAACA | 1698 |
| AM12160-SS-NL | gscaaggAfaAfcCfuacaacaaca | 1292 | GCAAGGAAACCUACAACAACA | 1698 |
| AM12164-SS-NL | gscugauUfuGfcCfugaacaagaa | 1293 | GCUGAUUUGCCUGAACAAGAA | 1632 |
| AM12168-SS-NL | gscugauUfuGfcCfuga_2Nacaagaa | 1294 | GCUGAUUUGCCUG(A^{2N})ACAAGAA | 1699 |
| AM12170-SS-NL | gsgcugaUfuUfgCfcugaacaaga | 1295 | GGCUGAUUUGCCUGAACAAGA | 1670 |
| AM12174-SS-NL | gsgaccaGfcAfuCfuucaucaaca | 1296 | GGACCAGCAUCUUCAUCAACA | 1631 |
| AM12179-SS-NL | csgagaucaUfCfUfuca_2Nacaacaa | 1297 | CGAGAUCAUCUUC(A^{2N})ACAACAA | 1700 |
| AM12188-SS-NL | csaucuuugAfUfGfaggacaagau | 1298 | CAUCUUUGAUGAGGACAAGAU | 1701 |
| AM12190-SS-NL | gscuuugauGfAfGfgacaagauga | 1299 | GCUUUGAUGAGGACAAGAUGA | 1702 |
| AM12192-SS-NL | gsucucugcUfCfCfuacaacuaga | 1300 | GUCUCUGCUCCUACAACUAGA | 1703 |
| AM12194-SS-NL | csaaccucuGfCfUfucuacaacua | 1301 | CAACCUCUGCUUCUACAACUA | 1704 |
| AM12196-SS-NL | csua_2NuaaccAfGfCfacaacuucua | 1302 | CU(A^{2N})UAACCAGCACAACUUCUA | 1705 |
| AM12198-SS-NL | csuauaaccAfGfCfacaacuucua | 1303 | CUAUAACCAGCACAACUUCUA | 1706 |
| AM12515-SS-NL | gscuguucuGfcGfaCfuacuacaa | 1304 | GCUGUUCUGCGACUACUACAA | 1617 |
| AM12517-SS-NL | gscuguuCfuGfcGfacuacuacaa | 1305 | GCUGUUCUGCGACUACUACAA | 1617 |
| AM12518-SS-NL | gscuguucuGfcGfacuacuacaa | 1306 | GCUGUUCUGCGACUACUACAA | 1617 |
| AM12520-SS-NL | gscuguuuuGfcGfacuacuacaa | 1307 | GCUGUUUUGCGACUACUACAA | 1707 |
| AM12521-SS-NL | gscuguucuGfcGfauuacuacaa | 1308 | GCUGUUCUGCGAUUACUACAA | 1708 |
| AM12522-SS-NL | gscuguucuGfcGfacuauuacaa | 1309 | GCUGUUCUGCGACUAUUACAA | 1709 |
| AM12523-SS-NL | gscuguucuGfcGfAfcuacuacaa | 1310 | GCUGUUCUGCGACUACUACAA | 1617 |
| AM12605-SS-NL | gscugauuuGfcCfugaacaagaa | 1311 | GCUGAUUUGCCUGAACAAGAA | 1632 |
| AM12606-SS-NL | gscugauuuGfcCfuGfaacaagaa | 1312 | GCUGAUUUGCCUGAACAAGAA | 1632 |
| AM12607-SS-NL | cscugauUfuGfcCfugaacaagaa | 1313 | CCUGAUUUGCCUGAACAAGAA | 1710 |
| AM12715-SS-NL | csgagaucaUfCfUfucaacaacaa | 1314 | CGAGAUCAUCUUCAACAACAA | 1667 |
| AM13074-SS-NL | gscugauUfuGfcCfugaacaagaa | 1315 | GCUGAUUUGCCUGAACAAGAA | 1632 |
| AM14080-SS-NL | gscuguucuGfCfGfacuacuacaa | 1316 | GCUGUUCUGCGACUACUACAA | 1617 |
| AM14081-SS-NL | gscugguucuGfCfGfacuacuacaa | 1317 | GCUGGUUCUGCGACUACUACAA | 1711 |
| AM14084-SS-NL | gscguucuGfCfGfacuacuacaa | 1318 | GCGUUCUGCGACUACUACAA | 1712 |

(A^{2N}) = 2-aminoadenine-containing nucleotide; I = hypoxanthine (inosine) nucleotide
** For the constructs in Table 4 above, a capping moiety, such as for example, (InvAb) or s(InvAb), or a conjugate is typically located at the 3′ end of the modified sense strand sequence shown (see, e.g., Table 5, below).

TABLE 5
MUC5AC Agent Sense Strand Sequences (Shown With TriAlk14 Linker
(see Table 12 for structure information)).

| | | | Underlying Base | |
|---|---|---|---|---|
| | | | Sequence (5′→3′) | |
| | | SEQ | (Shown as | SEQ |
| | | ID | an Unmodified | ID |
| Strand ID | Modified Sense Strand (5′→3′) | NO. | Nucleotide Sequence) | NO. |
| AM10578-SS | (TriAlk14)accugcucCfAfAfgiccaucaaas(invAb) | 1319 | ACCUGCUCCAAGICCAUCAAA | 1609 |
| AM10580-SS | (TriAlk14)ugcuccaaGfGfCfcaucaagauus(invAb) | 1320 | UGCUCCAAGGCCAUCAAGAUU | 1610 |
| AM10582-SS | (TriAlk14)aaccucagCfUfCfcgaguucaaas(invAb) | 1321 | AACCUCAGCUCCGAGUUCAAA | 1611 |
| AM10584-SS | (TriAlk14)cccagaagCfAfGfugcaicaucas(invAb) | 1322 | CCCAGAAGCAGUGCAICAUCA | 1612 |
| AM10586-SS | (TriAlk14)ugcccucuGfUfUfcugciacuaas(invAb) | 1323 | UGCCCUCUGUUCUGCIACUAA | 1613 |
| AM10588-SS | (TriAlk14)gcccucugUfUfCfuicgacuacus(invAb) | 1324 | GCCCUCUGUUCUICGACUACU | 1614 |
| AM10590-SS | (TriAlk14)ccucuguuCfUfGfcgacuacuaas(invAb) | 1325 | CCUCUGUUCUGCGACUACUAA | 1615 |
| AM10592-SS | (TriAlk14)cucuguucUfGfCfgacuacuacas(invAb) | 1326 | CUCUGUUCUGCGACUACUACA | 1616 |
| AM10594-SS | (TriAlk14)gcuguucuGfCfGfacuacuacaas(invAb) | 1327 | GCUGUUCUGCGACUACUACAA | 1617 |
| AM10596-SS | (TriAlk14)ccacccauCfUfGfcuacaacuaus(invAb) | 1328 | CCACCCAUCUGCUACAACUAU | 1618 |
| AM10598-SS | (TriAlk14)gcaaagugGfUfUfcgaciuggaas(invAb) | 1329 | GCAAAGUGGUUCGACIUGGAA | 1619 |
| AM10600-SS | (TriAlk14)gagugguuCfGfAfcgugiacuuas(invAb) | 1330 | GAGUGGUUCGACGUGIACUUA | 1620 |
| AM10602-SS | (TriAlk14)gugguucgAfCfGfugiacuuccas(invAb) | 1331 | GUGGUUCGACGUGIACUUCCA | 1621 |
| AM10604-SS | (TriAlk14)gugguucgAfCfGfuggacuuccas(invAb) | 1332 | GUGGUUCGACGUGGACUUCCA | 1622 |
| AM10738-SS | (TriAlk14)csagcuuccAfCfUfacaaiaccuus(invAb) | 1333 | CAGCUUCCACUACAAIACCUU | 1623 |
| AM10740-SS | (TriAlk14)csagcuuccAfCfUfacaagaccuus(invAb) | 1334 | CAGCUUCCACUACAAGACCUU | 1624 |
| AM10742-SS | (TriAlk14)gsa_2NaguaugCfUfCfagcacugiuas(invAb) | 1335 | G(A^{2N})AGUAUGCUCAGCACUGIUA | 1625 |
| AM10745-SS | (TriAlk14)gsa_2NaguaugCfUfCfaguacugiuas(invAb) | 1336 | G(A^{2N})AGUAUGCUCAGUACUGIUA | 1626 |
| AM10746-SS | (TriAlk14)gsccuucuuCfAfAfcaccuucaaas(invAb) | 1337 | GCCUUCUUCAACACCUUCAAA | 1627 |
| AM10748-SS | (TriAlk14)gsccuucuuCfAfAfcaucuucaaas(invAb) | 1338 | GCCUUCUUCAACAUCUUCAAA | 1628 |
| AM10749-SS | (TriAlk14)gsccuucuuCfAfAfcacuuucaaas(invAb) | 1339 | GCCUUCUUCAACACUUUCAAA | 1629 |
| AM10763-SS | (TriAlk14)gggacaagAfAfGfaccaicaucus(invAb) | 1340 | GGGACAAGAAGACCAICAUCU | 1630 |
| AM10765-SS | (TriAlk14)ggaccagcAfUfCfuucaucaacas(invAb) | 1341 | GGACCAGCAUCUUCAUCAACA | 1631 |
| AM10767-SS | (TriAlk14)gcugauuuGfCfCfugaacaagaas(invAb) | 1342 | GCUGAUUUGCCUGAACAAGAA | 1632 |
| AM10769-SS | (TriAlk14)ca_2NaggaaaCfCfUfacaacaacaus(invAb) | 1343 | C(A^{2N})AGGAAACCUACAACAACAU | 1633 |
| AM10771-SS | (TriAlk14)ggaaaccuAfCfAfacaacaucaus(invAb) | 1344 | GGAAACCUACAACAACAUCAU | 1634 |
| AM10789-SS | (TriAlk14)ga_2NagaccaGfCfAfucuucaucaas(invAb) | 1345 | G(A^{2N})AGACCAGCAUCUUCAUCAA | 1635 |
| AM10791-SS | (TriAlk14)gcugcuacAfAfCfuaccaiaucas(invAb) | 1346 | GCUGCUACAACUACCAIAUCA | 1636 |
| AM10793-SS | (TriAlk14)gcuacaacUfAfCfcagaucaigas(invAb) | 1347 | GCUACAACUACCAGAUCAIGA | 1637 |
| AM10795-SS | (TriAlk14)cccacccaUfCfUfgcuacaacuas(invAb) | 1348 | CCCACCCAUCUGCUACAACUA | 1638 |
| AM10797-SS | (TriAlk14)gagauccgCfAfUfccaguiuugas(invAb) | 1349 | GAGAUCCGCAUCCAGUIUUGA | 1639 |
| AM10799-SS | (TriAlk14)ccagagguGfAfGfcauciaacaas(invAb) | 1350 | CCAGAGGUGAGCAUCIAACAA | 1640 |
| AM10801-SS | (TriAlk14)cagcagggAfCfCfcuucaagauas(invAb) | 1351 | CAGCAGGGACCCUUCAAGAUA | 1641 |
| AM10803-SS | (TriAlk14)ca_2NagauguGfCfCfucaacuacias(invAb) | 1352 | C(A^{2N})AGAUGUGCCUCAACUACIA | 1642 |
| AM10805-SS | (TriAlk14)ggaugugcCfUfCfaacuaciagas(invAb) | 1353 | GGAUGUGCCUCAACUACIAGA | 1643 |
| AM10807-SS | (TriAlk14)cagcuuccAfCfUfacaaiaccuus(invAb) | 1354 | CAGCUUCCACUACAAIACCUU | 1623 |
| AM10809-SS | (TriAlk14)gacagcgaGfAfCfcugcuugaaas(invAb) | 1355 | GACAGCGAGACCUGCUUGAAA | 1644 |
| AM10811-SS | (TriAlk14)ccaacgucAfCfCfaucuucagaas(invAb) | 1356 | CCAACGUCACCAUCUUCAGAA | 1645 |
| AM10813-SS | (TriAlk14)ca_2NacgucaCfCfAfucuucaiacas(invAb) | 1357 | C(A^{2N})ACGUCACCAUCUUCAIACA | 1646 |
| AM10815-SS | (TriAlk14)cauccaggCfCfGfaugacuuccas(invAb) | 1358 | CAUCCAGGCCGAUGACUUCCA | 1647 |
| AM10817-SS | (TriAlk14)gccuucuuCfAfAfcaccuucaaas(invAb) | 1359 | GCCUUCUUCAACACCUUCAAA | 1627 |
| AM10819-SS | (TriAlk14)ga_2NaguaugCfUfCfagcacugiuas(invAb) | 1360 | G(A^{2N})AGUAUGCUCAGCACUGIUA | 1625 |
| AM10820-SS | (TriAlk14)ga_2NaccuacUfAfCfucgaacuicas(invAb) | 1361 | G(A^{2N})ACCUACUACUCGAACUICA | 1648 |
| AM10822-SS | (TriAlk14)acagggacCfAfCfcugcuucaaas(invAb) | 1362 | ACAGGGACCACCUGCUUCAAA | 1649 |
| AM10824-SS | (TriAlk14)ccugcuccAfAfGfgcuaucaagas(invAb) | 1363 | CCUGCUCCAAGGCUAUCAAGA | 1650 |
| AM10826-SS | (TriAlk14)ca_2NuguggaAfCfCfacgauiacaas(invAb) | 1364 | C(A^{2N})UGUGGAACCACGAUIACAA | 1651 |
| AM10828-SS | (TriAlk14)aggcaagaCfCfUfcugcuucuius(invAb) | 1365 | AGGCAAGACCUCUGCUUCUIU | 1652 |
| AM10830-SS | (TriAlk14)uccacagaCfUfGfcaccaacuias(invAb) | 1366 | UCCACAGACUGCACCAACUIA | 1653 |
| AM10832-SS | (TriAlk14)gcagugccUfUfCfacuguacuias(invAb) | 1367 | GCAGUGCCUUCACUGUACUIA | 1654 |
| AM10834-SS | (TriAlk14)gcugugggAfAfCfuucaacaicas(invAb) | 1368 | GCUGUGGGAACUUCAACAICA | 1655 |
| AM10836-SS | (TriAlk14)gugggaacUfUfCfaacaicaucas(invAb) | 1369 | GUGGGAACUUCAACAICAUCA | 1656 |
| AM10838-SS | (TriAlk14)gcuucaacAfCfCfuucaaiaccas(invAb) | 1370 | GCUUCAACACCUUCAAIACCA | 1657 |
| AM10840-SS | (TriAlk14)ccccaacaUfCfAfggaacaicuus(invAb) | 1371 | CCCCAACAUCAGGAACAICUU | 1658 |
| AM10842-SS | (TriAlk14)ccuacuacUfCfGfaacuicaugus(invAb) | 1372 | CCUACUACUCGAACUICAUGU | 1659 |
| AM10844-SS | (TriAlk14)gucaccugCfAfGfuguugicuuas(invAb) | 1373 | GUCACCUGCAGUGUUGICUUA | 1660 |
| AM10846-SS | (TriAlk14)gcuggacaUfGfAfccuguuacaas(invAb) | 1374 | GCUGGACAUGACCUGUUACAA | 1661 |
| AM10848-SS | (TriAlk14)gcagagcuAfCfAfgcuucaacias(invAb) | 1375 | GCAGAGCUACAGCUUCAACIA | 1662 |
| AM11066-SS | (TriAlk14)ga_2NaguaugCfUfCfaguacugiuas(invAb) | 1376 | G(A^{2N})AGUAUGCUCAGUACUGIUA | 1626 |
| AM11263-SS | (TriAlk14)csugcuacaAfCfUfaugagauccas(invAb) | 1377 | CUGCUACAACUAUGAGAUCCA | 1663 |
| AM11265-SS | (TriAlk14)csugcuacaAfCfUfaugaiauccas(invAb) | 1378 | CUGCUACAACUAUGAIAUCCA | 1664 |
| AM11267-SS | (TriAlk14)cscuggaccAfAfGfugguuugacas(invAb) | 1379 | CCUGGACCAAGUGGUUUGACA | 1665 |
| AM11269-SS | (TriAlk14)cscuggaccAfAfGfugguuuiacas(invAb) | 1380 | CCUGGACCAAGUGGUUUIACA | 1666 |
| AM11270-SS | (TriAlk14)csgagaucaUfCfUfucaacaacaas(invAb) | 1381 | CGAGAUCAUCUUCAACAACAA | 1667 |
| AM11274-SS | (TriAlk14)agcagugcCfUfUfcacuguacuas(invAb) | 1382 | AGCAGUGCCUUCACUGUACUA | 1668 |
| AM11276-SS | (TriAlk14)gacaucagGfAfAfcagcuuciaas(invAb) | 1383 | GACAUCAGGAACAGCUUCIAA | 1669 |
| AM11278-SS | (TriAlk14)ggcugauuUfGfCfcugaacaagas(invAb) | 1384 | GGCUGAUUUGCCUGAACAAGA | 1670 |
| AM11280-SS | (TriAlk14)ccaggacaAfCfCfacuuuigugas(invAb) | 1385 | CCAGGACAACCACUUUIGUGA | 1671 |
| AM11282-SS | (TriAlk14)caaccagaAfCfAfaccucuicuas(invAb) | 1386 | CAACCAGAACAACCUCUICUA | 1672 |
| AM11284-SS | (TriAlk14)cgcuacaaCfCfAfgcacaaucuas(invAb) | 1387 | CGCUACAACCAGCACAAUCUA | 1673 |
| AM11286-SS | (TriAlk14)ccacaaccAfGfCfacaacuucuas(invAb) | 1388 | CCACAACCAGCACAACUUCUA | 1674 |
| AM11288-SS | (TriAlk14)gacaaccaCfUfUfuggugacaaas(invAb) | 1389 | GACAACCACUUUGGUGACAAA | 1675 |
| AM11290-SS | (TriAlk14)cuacaaccAfAfCfacaacuucuas(invAb) | 1390 | CUACAACCAACACAACUUCUA | 1676 |
| AM11292-SS | (TriAlk14)accucugcUfCfCfuacaacuagas(invAb) | 1391 | ACCUCUGCUCCUACAACUAGA | 1677 |
| AM11400-SS | (TriAlk14)gscuguucuGfCfGfacuacuacaas(invAb) | 1392 | GCUGUUCUGCGACUACUACAA | 1617 |
| AM11402-SS | (TriAlk14)gscuguucuGfUfGfacuacuacaas(invAb) | 1393 | GCUGUUCUGUGACUACUACAA | 1678 |
| AM11463-SS | (TriAlk14)asccagaucAfUfCfuucaacaacas(invAb) | 1394 | ACCAGAUCAUCUUCAACAACA | 1679 |
| AM11466-SS | (TriAlk14)gsgcucuguGfGfUfaacuucaacas(invAb) | 1395 | GGCUCUGUGGUAACUUCAACA | 1680 |
| AM11468-SS | (TriAlk14)gsagcguggAfGfAfaugaaaaguas(invAb) | 1396 | GAGCGUGGAGAAUGAAAAGUA | 1681 |
| AM11470-SS | (TriAlk14)gsggagaauGfAfAfaaguaugcuas(invAb) | 1397 | GGGAGAAUGAAAAGUAUGCUA | 1682 |
| AM11472-SS | (TriAlk14)csuucucgaAfCfUfgcauguaugas(invAb) | 1398 | CUUCUCGAACUGCAUGUAUGA | 1683 |
| AM11474-SS | (TriAlk14)gscucgaacUfGfCfauguaugacas(invAb) | 1399 | GCUCGAACUGCAUGUAUGACA | 1684 |
| AM11476-SS | (TriAlk14)csucgaacuGfCfAfuguaugacaas(invAb) | 1400 | CUCGAACUGCAUGUAUGACAA | 1685 |
| AM11478-SS | (TriAlk14)cscacuguuCfUfGfugacuacuaas(invAb) | 1401 | CCACUGUUCUGUGACUACUAA | 1686 |
| AM11480-SS | (TriAlk14)csacuguucUfGfUfgacuacuacas(invAb) | 1402 | CACUGUUCUGUGACUACUACA | 1687 |
| AM11497-SS | (TriAlk14)cscuucuucUfCfGfaacuicaugus(invAb) | 1403 | CCUUCUUCUCGAACUICAUGU | 1688 |
| AM11739-SS | (TriAlk14)cscacccauGfUfGfcuacaacuaus(invAb) | 1404 | CCACCCAUGUGCUACAACUAU | 1689 |
| AM11743-SS | (TriAlk14)csugcuaCfaAfcUfaugaiauccas(invAb) | 1405 | CUGCUACAACUAUGAIAUCCA | 1664 |
| AM11744-SS | (TriAlk14)csgagauCfaUfcUfucaacaacaas(invAb) | 1406 | CGAGAUCAUCUUCAACAACAA | 1667 |
| AM11822-SS | (TriAlk14)csacuguUfcUfgUfgacuacuacas(invAb) | 1407 | CACUGUUCUGUGACUACUACA | 1687 |
| AM11824-SS | (TriAlk14)gsacuguUfcUfgUfgacuacuacas(invAb) | 1408 | GACUGUUCUGUGACUACUACA | 1690 |
| AM11970-SS | (TriAlk14)uggggaagUfGfUfuccuiaaccas(invAb) | 1409 | UGGGGAAGUGUUCCUIAACCA | 1691 |
| AM11972-SS | (TriAlk14)ggacaucaCfCfUfgcaguiuugas(invAb) | 1410 | GGACAUCACCUGCAGUIUUGA | 1692 |
| AM11974-SS | (TriAlk14)ugugggaaCfUfUfcgaciacauas(invAb) | 1411 | UGUGGGAACUUCGACIACAUA | 1693 |
| AM11976-SS | (TriAlk14)gucuuugaUfGfAfggacaagauas(invAb) | 1412 | GUCUUUGAUGAGGACAAGAUA | 1694 |
| AM11978-SS | (TriAlk14)ggacgucaUfCfUfaccacaciaas(invAb) | 1413 | GGACGUCAUCUACCACACIAA | 1695 |
| AM11980-SS | (TriAlk14)cugcuacaAfCfUfaugaiauccas(invAb) | 1414 | CUGCUACAACUAUGAIAUCCA | 1664 |
| AM11981-SS | (TriAlk14)gcaccuccUfCfUfugicagaaaus(invAb) | 1415 | GCACCUCCUCUUGICAGAAAU | 1696 |
| AM11983-SS | (TriAlk14)acgagaucAfUfCfuucaacaacas(invAb) | 1416 | ACGAGAUCAUCUUCAACAACA | 1697 |
| AM11985-SS | (TriAlk14)cgagaucaUfCfUfucaacaacaas(invAb) | 1417 | CGAGAUCAUCUUCAACAACAA | 1667 |
| AM12157-SS | (TriAlk14)gcaaggaaAfCfCfuacaacaacas(invAb) | 1418 | GCAAGGAAACCUACAACAACA | 1698 |
| AM12160-SS | (TriAlk14)gcaaggAfaAfcCfuacaacaacas(invAb) | 1419 | GCAAGGAAACCUACAACAACA | 1698 |
| AM12164-SS | (TriAlk14)gcugauUfuGfcCfugaacaagaas(invAb) | 1420 | GCUGAUUUGCCUGAACAAGAA | 1632 |
| AM12168-SS | (TriAlk14)gcugauUfuGfcCfuga_2Nacaagaas(invAb) | 1421 | GCUGAUUUGCCUG(A^{2N})ACAAGAA | 1699 |
| AM12170-SS | (TriAlk14)ggcugaUfuUfgCfcugaacaagas(invAb) | 1422 | GGCUGAUUUGCCUGAACAAGA | 1670 |
| AM12174-SS | (TriAlk14)ggaccaGfcAfuCfuucaucaacas(invAb) | 1423 | GGACCAGCAUCUUCAUCAACA | 1631 |
| AM12179-SS | (TriAlk14)csgagaucaUfCfUfuca_2Nacaacaas(invAb) | 1424 | CGAGAUCAUCUUC(A^{2N})ACAACAA | 1700 |
| AM12188-SS | (TriAlk14)caucuuugAfUfGfaggacaagaus(invAb) | 1425 | CAUCUUUGAUGAGGACAAGAU | 1701 |
| AM12190-SS | (TriAlk14)gcuuugauGfAfGfgacaagaugas(invAb) | 1426 | GCUUUGAUGAGGACAAGAUGA | 1702 |
| AM12192-SS | (TriAlk14)gucucugcUfCfCfuacaacuagas(invAb) | 1427 | GUCUCUGCUCCUACAACUAGA | 1703 |
| AM12194-SS | (TriAlk14)caaccucuGfCfUfucuacaacuas(invAb) | 1428 | CAACCUCUGCUUCUACAACUA | 1704 |
| AM12196-SS | (TriAlk14)cua_2NuaaccAfGfCfacaacuucuas(invAb) | 1429 | CU(A^{2N})UAACCAGCACAACUUCUA | 1705 |
| AM12198-SS | (TriAlk14)cuauaaccAfGfCfacaacuucuas(invAb) | 1430 | CUAUAACCAGCACAACUUCUA | 1706 |
| AM12515-SS | (TriAlk14)gcuguucuGfcGfaCfuacuacaas(invAb) | 1431 | GCUGUUCUGCGACUACUACAA | 1617 |
| AM12517-SS | (TriAlk14)gcuguuCfuGfcGfacuacuacaas(invAb) | 1432 | GCUGUUCUGCGACUACUACAA | 1617 |
| AM12518-SS | (TriAlk14)gcuguucuGfcGfacuacuacaas(invAb) | 1433 | GCUGUUCUGCGACUACUACAA | 1617 |
| AM12520-SS | (TriAlk14)gcuguuuuGfcGfacuacuacaas(invAb) | 1434 | GCUGUUUUGCGACUACUACAA | 1707 |
| AM12521-SS | (TriAlk14)gcuguucuGfcGfauuacuacaas(invAb) | 1435 | GCUGUUCUGCGAUUACUACAA | 1708 |
| AM12522-SS | (TriAlk14)gcuguucuGfcGfacuauuacaas(invAb) | 1436 | GCUGUUCUGCGACUAUUACAA | 1709 |
| AM12523-SS | (TriAlk14)gcuguucuGfcGfAfcuacuacaas(invAb) | 1437 | GCUGUUCUGCGACUACUACAA | 1617 |
| AM12605-SS | (TriAlk14)gcugauuuGfcCfugaacaagaas(invAb) | 1438 | GCUGAUUUGCCUGAACAAGAA | 1632 |
| AM12606-SS | (TriAlk14)gcugauuuGfcCfuGfaacaagaas(invAb) | 1439 | GCUGAUUUGCCUGAACAAGAA | 1632 |
| AM12607-SS | (TriAlk14)ccugauUfuGfcCfugaacaagaas(invAb) | 1440 | CCUGAUUUGCCUGAACAAGAA | 1710 |
| AM13074-SS | (TriAlk14)gscugauUfuGfcCfugaacaagaas(invAb) | 1441 | GCUGAUUUGCCUGAACAAGAA | 1632 |
| AM14080-SS | (TriAlk14)gscuguucuGfCfGfacuacuacaa(invAb) | 1442 | GCUGUUCUGCGACUACUACAA | 1617 |
| AM14081-SS | (TriAlk14)gscugguucuGfCfGfacuacuacaas(invAb) | 1443 | GCUGGUUCUGCGACUACUACAA | 1711 |
| AM14084-SS | (TriAlk14)gscguucuGfCfGfacuacuacaas(invAb) | 1444 | GCGUUCUGCGACUACUACAA | 1712 |

(A^{2N}) = 2-aminoadenine-containing nucleotide; I = hypoxanthine (inosine) nucleotide

TABLE 6
Nucleotide Sequences With End Caps Shown For Certain
MUC5AC RNAi Agents Tested In Vitro.

| | | | Underlying Base | |
|---|---|---|---|---|
| | | | Sequence (5′→3′) | |
| | | SEQ | (Shown as | SEQ |
| | | ID | an Unmodified | ID |
| Strand ID | Modified Sense Strand (5′ → 3′) | NO. | Nucleotide Sequence) | NO. |
| AM10594-SS-S | (invAb)sgcuguucuGfCfGfacuacuacaas(invAb) | 1445 | GCUGUUCUGCGACUACUACAA | 1617 |
| AM10600-SS-S | (invAb)sgagugguuCfGfAfcgugiacuuas(invAb) | 1446 | GAGUGGUUCGACGUGIACUUA | 1620 |
| AM10765-SS-S | (invAb)sggaccagcAfUfCfuucaucaacas(invAb) | 1447 | GGACCAGCAUCUUCAUCAACA | 1631 |
| AM10767-SS-S | (invAb)sgcugauuuGfCfCfugaacaagaas(invAb) | 1448 | GCUGAUUUGCCUGAACAAGAA | 1632 |
| AM10769-SS-S | (invAb)sca_2NaggaaaCfCfUfacaacaacaus(invAb) | 1449 | C(A^{2N})AGGAAACCUACAACAACAU | 1633 |
| AM10771-SS-S | (invAb)sggaaaccuAfCfAfacaacaucaus(invAb) | 1450 | GGAAACCUACAACAACAUCAU | 1634 |
| AM10791-SS-S | (invAb)sgcugcuacAfAfCfuaccaiaucas(invAb) | 1451 | GCUGCUACAACUACCAIAUCA | 1636 |
| AM10793-SS-S | (invAb)sgcuacaacUfAfCfcagaucaigas(invAb) | 1452 | GCUACAACUACCAGAUCAIGA | 1637 |
| AM10795-SS-S | (invAb)scccacccaUfCfUfgcuacaacuas(invAb) | 1453 | CCCACCCAUCUGCUACAACUA | 1638 |
| AM10797-SS-S | (invAb)sgagauccgCfAfUfccaguiuugas(invAb) | 1454 | GAGAUCCGCAUCCAGUIUUGA | 1639 |
| AM10799-SS-S | (invAb)sccagagguGfAfGfcauciaacaas(invAb) | 1455 | CCAGAGGUGAGCAUCIAACAA | 1640 |
| AM10801-SS-S | (invAb)scagcagggAfCfCfcuucaagauas(invAb) | 1456 | CAGCAGGGACCCUUCAAGAUA | 1641 |
| AM10803-SS-S | (invAb)sca_2NagauguGfCfCfucaacuacias(invAb) | 1457 | C(A^{2N})AGAUGUGCCUCAACUACIA | 1642 |
| AM10813-SS-S | (invAb)sca_2NacgucaCfCfAfucuucaiacas(invAb) | 1458 | C(A^{2N})ACGUCACCAUCUUCAIACA | 1646 |
| AM10820-SS-S | (invAb)sga_2NaccuacUfAfCfucgaacuicas(invAb) | 1459 | G(A^{2N})ACCUACUACUCGAACUICA | 1648 |
| AM10826-SS-S | (invAb)sca_2NuguggaAfCfCfacgauiacaas(invAb) | 1460 | C(A^{2N})UGUGGAACCACGAUIACAA | 1651 |
| AM10828-SS-S | (invAb)saggcaagaCfCfUfcugcuucuius(invAb) | 1461 | AGGCAAGACCUCUGCUUCUIU | 1652 |
| AM10832-SS-S | (invAb)sgcagugccUfUfCfacuguacuias(invAb) | 1462 | GCAGUGCCUUCACUGUACUIA | 1654 |
| AM10836-SS-S | (invAb)sgugggaacUfUfCfaacaicaucas(invAb) | 1463 | GUGGGAACUUCAACAICAUCA | 1656 |
| AM10840-SS-S | (invAb)sccccaacaUfCfAfggaacaicuus(invAb) | 1464 | CCCCAACAUCAGGAACAICUU | 1658 |
| AM10842-SS-S | (invAb)sccuacuacUfCfGfaacuicaugus(invAb) | 1465 | CCUACUACUCGAACUICAUGU | 1659 |
| AM10844-SS-S | (invAb)sgucaccugCfAfGfuguugicuuas(invAb) | 1466 | GUCACCUGCAGUGUUGICUUA | 1660 |
| AM10846-SS-S | (invAb)sgcuggacaUfGfAfccuguuacaas(invAb) | 1467 | GCUGGACAUGACCUGUUACAA | 1661 |
| AM10848-SS-S | (invAb)sgcagagcuAfCfAfgcuucaacias(invAb) | 1468 | GCAGAGCUACAGCUUCAACIA | 1662 |
| AM11274-SS-S | (invAb)sagcagugcCfUfUfcacuguacuas(invAb) | 1469 | AGCAGUGCCUUCACUGUACUA | 1668 |
| AM11276-SS-S | (invAb)sgacaucagGfAfAfcagcuuciaas(invAb) | 1470 | GACAUCAGGAACAGCUUCIAA | 1669 |
| AM11278-SS-S | (invAb)sggcugauuUfGfCfcugaacaagas(invAb) | 1471 | GGCUGAUUUGCCUGAACAAGA | 1670 |
| AM11280-SS-S | (invAb)sccaggacaAfCfCfacuuuigugas(invAb) | 1472 | CCAGGACAACCACUUUIGUGA | 1671 |
| AM11286-SS-S | (invAb)sccacaaccAfGfCfacaacuucuas(invAb) | 1473 | CCACAACCAGCACAACUUCUA | 1674 |
| AM11288-SS-S | (invAb)sgacaaccaCfUfUfuggugacaaas(invAb) | 1474 | GACAACCACUUUGGUGACAAA | 1675 |
| AM11292-SS-S | (invAb)saccucugcUfCfCfuacaacuagas(invAb) | 1475 | ACCUCUGCUCCUACAACUAGA | 1677 |
| AM11978-SS-S | (invAb)sggacgucaUfCfUfaccacaciaas(invAb) | 1476 | GGACGUCAUCUACCACACIAA | 1695 |
| AM11980-SS-S | (invAb)scugcuacaAfCfUfaugaiauccas(invAb) | 1477 | CUGCUACAACUAUGAIAUCCA | 1664 |
| AM11983-SS-S | (invAb)sacgagaucAfUfCfuucaacaacas(invAb) | 1478 | ACGAGAUCAUCUUCAACAACA | 1697 |
| AM11985-SS-S | (invAb)scgagaucaUfCfUfucaacaacaas(invAb) | 1479 | CGAGAUCAUCUUCAACAACAA | 1667 |
| AM12164-SS-S | (invAb)sgcugauUfuGfcCfugaacaagaas(invAb) | 1480 | GCUGAUUUGCCUGAACAAGAA | 1632 |
| AM12168-SS-S | (invAb)sgcugauUfuGfcCfuga_2Nacaagaas(invAb) | 1481 | GCUGAUUUGCCUG(A^{2N})ACAAGAA | 1699 |
| AM12170-SS-S | (invAb)sggcugaUfuUfgCfcugaacaagas(invAb) | 1482 | GGCUGAUUUGCCUGAACAAGA | 1670 |

(A^{2N}) = 2-aminoadenine-containing nucleotide; I = hypoxanthine (inosine) nucleotide

TABLE 7
MUC5AC Agent Sense Strand Sequences (Shown with Targeting Ligand Conjugate.
The structure of αvβ6-SM6.1 is shown in Table 12, and the structure of
Tri-SM6.1- αvβ6-(TA14) is shown in FIG. 1.)

| | | | Corresponding |
|---|---|---|---|
| | | | Sense Strand |
| | | | AM Number |
| | | | Without |
| | | SEQ | Linker or |
| Strand | | ID | Conjugate |
| ID | Modified Sense Strand (5′→3′) | NO. | (See Table 4) |
| CS000387 | Tri-SM6.1-avb6-(TA14)gsa_2NaguaugCfUfCfaguacugiuas(invAb) | 1483 | AM10745-SS |
| CS000517 | Tri-SM6.1-avb6-(TA14)ascccauguGfCfUfacaacuaugas(invAb) | 1484 | AM09492-SS |
| CS000519 | Tri-SM6.1-avb6-(TA14)cscauacagCfAfGfuacaguuacas(invAb) | 1485 | AM09657-SS |
| CS000521 | Tri-SM6.1-avb6-(TA14)csugcuacaAfCfUfaugagauccas(invAb) | 1486 | AM11263-SS |
| CS000523 | Tri-SM6.1-avb6-(TA14)csugcuacaAfCfUfaugaiauccas(invAb) | 1487 | AM11265-SS |
| CS000525 | Tri-SM6.1-avb6-(TA14)cscuggaccAfAfGfugguuugacas(invAb) | 1488 | AM11267-SS |
| CS000527 | Tri-SM6.1-avb6-(TA14)cscuggaccAfAfGfugguuuiacas(invAb) | 1489 | AM11269-SS |
| CS000528 | Tri-SM6.1-avb6-(TA14)csgagaucaUfCfUfucaacaacaas(invAb) | 1490 | AM11270-SS |
| CS000578 | Tri-SM6.1-avb6-(TA14)gscuguucuGfCfGfacuacuacaas(invAb) | 1491 | AM11400-SS |
| CS000583 | Tri-SM6.1-avb6-(TA14)gscuguucuGfUfGfacuacuacaas(invAb) | 1492 | AM11402-SS |
| CS000608 | Tri-SM6.1-avb6-(TA14)asccagaucAfUfCfuucaacaacas(invAb) | 1493 | AM11463-SS |
| CS000612 | Tri-SM6.1-avb6-(TA14)gsgcucuguGfGfUfaacuucaacas(invAb) | 1494 | AM11466-SS |
| CS000614 | Tri-SM6.1-avb6-(TA14)gsagcguggAfGfAfaugaaaaguas(invAb) | 1495 | AM11468-SS |
| CS000616 | Tri-SM6.1-avb6-(TA14)gsggagaauGfAfAfaaguaugcuas(invAb) | 1496 | AM11470-SS |
| CS000618 | Tri-SM6.1-avb6-(TA14)csuucucgaAfCfUfgcauguaugas(invAb) | 1497 | AM11472-SS |
| CS000620 | Tri-SM6.1-avb6-(TA14)gscucgaacUfGfCfauguaugacas(invAb) | 1498 | AM11474-SS |
| CS000622 | Tri-SM6.1-avb6-(TA14)csucgaacuGfCfAfuguaugacaas(invAb) | 1499 | AM11476-SS |
| CS000624 | Tri-SM6.1-avb6-(TA14)cscacuguuCfUfGfugacuacuaas(invAb) | 1500 | AM11478-SS |
| CS000626 | Tri-SM6.1-avb6-(TA14)csacuguucUfGfUfgacuacuacas(invAb) | 1501 | AM11480-SS |
| CS000665 | Tri-SM6.1-avb6-(TA14)cscuucuucUfCfGfaacuicaugus(invAb) | 1502 | AM11497-SS |
| CS001001 | Tri-SM6.1-avb6-(TA14)csagcuuccAfCfUfacaaiaccuus(invAb) | 1503 | AM10738-SS |
| CS001003 | Tri-SM6.1-avb6-(TA14)csagcuuccAfCfUfacaagaccuus(invAb) | 1504 | AM10740-SS |
| CS001005 | Tri-SM6.1-avb6-(TA14)gsa_2NaguaugCfUfCfagcacugiuas(invAb) | 1505 | AM10742-SS |
| CS001007 | Tri-SM6.1-avb6-(TA14)gsccuucuuCfAfAfcaccuucaaas(invAb) | 1506 | AM10746-SS |
| CS001009 | Tri-SM6.1-avb6-(TA14)gsccuucuuCfAfAfcaucuucaaas(invAb) | 1507 | AM10748-SS |
| CSOO1O1O | Tri-SM6.1-avb6-(TA14)gsccuucuuCfAfAfcacuuucaaas(invAb) | 1508 | AM10749-SS |
| CS001036 | Tri-SM6.1-avb6-(TA14)cscacccauGfUfGfcuacaacuaus(invAb) | 1509 | AM11739-SS |
| CS001040 | Tri-SM6.1-avb6-(TA14)csugcuaCfaAfcUfaugaiauccas(invAb) | 1510 | AM11743-SS |
| CS001041 | Tri-SM6.1-avb6-(TA14)csgagauCfaUfcUfucaacaacaas(invAb) | 1511 | AM11744-SS |
| CS001401 | Tri-SM6.1-avb6-(TA14)csgagaucaUfCfUfuca_2Nacaacaas(invAb) | 1512 | AM12179-SS |
| CS001644 | Tri-SM6.1-avb6-(TA14)gscugauUfuGfcCfugaacaagaas(invAb) | 1513 | AM13074-SS |
| CS002194 | Tri-SM6.1-avb6-(TA14)gscuguucuGfCfGfacuacuacaa(invAb) | 1514 | AM14080-SS |
| CS002195 | Tri-SM6.1-avb6-(TA14)gscugguucuGfCfGfacuacuacaas(invAb) | 1515 | AM14081-SS |
| CS002196 | Tri-SM6.1-avb6-(TA14)gscguucuGfCfGfacuacuacaas(invAb) | 1516 | AM14084-SS |

[0197] The MUC5AC RNAi agents disclosed herein are formed by annealing an antisense strand with a sense strand. A sense strand containing a sequence listed in Table 2, Table 4, Table 5, Table 6, or Table 7 can be hybridized to any antisense strand containing a sequence listed in Table 2 or Table 3, provided the two sequences have a region of at least 85% complementarity over a contiguous 16, 17, 18, 19, 20, or 21 nucleotide sequence.

[0198] As shown in Table 5 above, certain of the example MUC5AC RNAi agent nucleotide sequences are shown to further include reactive linking groups at one or both of the 5′ terminal end and the 3′ terminal end of the sense strand. For example, many of the MUC5AC RNAi agent sense strand sequences shown in Table 5 above have a (TriAlk14) linking group at the 5′ end of the nucleotide sequence. Other linking groups, such as an (NH2-C6) linking group or a (6-SS-6) or (C6-SS-C6) linking group, may be present as well or alternatively in certain embodiments. Such reactive linking groups are positioned to facilitate the linking of targeting ligands, targeting groups, and/or PK/PD modulators to the MUC5AC RNAi agents disclosed herein. Linking or conjugation reactions are well known in the art and provide for formation of covalent linkages between two molecules or reactants. Suitable conjugation reactions for use in the scope of the inventions herein include, but are not limited to, amide coupling reaction, Michael addition reaction, hydrazone formation reaction, inverse-demand Diels-Alder cycloaddition reaction, oxime ligation, and Copper (I)-catalyzed or strain-promoted azide-alkyne cycloaddition reaction cycloaddition reaction.

[0199] In some embodiments, targeting ligands, such as the integrin targeting ligands shown in the examples and figures disclosed herein, can be synthesized as activated esters, such as tetrafluorophenyl (TFP) esters, which can be displaced by a reactive amino group (e.g., NH₂—C₆) to attach the targeting ligand to the MUC5AC RNAi agents disclosed herein. In some embodiments, targeting ligands are synthesized as azides, which can be conjugated to a propargyl (e.g., TriAlk14) or DBCO group, for example, via Copper (I)-catalyzed or strain-promoted azide-alkyne cycloaddition reaction.

[0200] Additionally, the nucleotide sequences can be synthesized with a dT nucleotide at the 3′ terminal end of the sense strand, followed by (3′→5′) a linker (e.g., C6-SS-C6). The linker can, in some embodiments, facilitate the linkage to additional components, such as, for example, a PK/PD modulator or one or more targeting ligands. The disulfide bond of C6-SS-C6 can then be reduced, removing the dT from the molecule, which can then facilitate the conjugation of the desired PK/PD modulator. The terminal dT nucleotide would therefore not be a part of the fully conjugated construct.

[0201] In some embodiments, the antisense strand of a MUC5AC RNAi agent disclosed herein differs by 0, 1, 2, or 3 nucleotides from any of the antisense strand sequences in Table 3 or Table 11. In some embodiments, the sense strand of a MUC5AC RNAi agent disclosed herein differs by 0, 1, 2, or 3 nucleotides from any of the sense strand sequences in Table 4, Table 5, Table 6, Table 7, or Table 11.

[0202] In some embodiments, a MUC5AC RNAi agent antisense strand comprises a nucleotide sequence of any of the sequences in Table 2 or Table 3. In some embodiments, a MUC5AC RNAi agent antisense strand comprises the sequence of nucleotides (from 5′ end→3′ end) 1-17, 2-17, 1-18, 2-18, 1-19, 2-19, 1-20, 2-20, 1-21, 2-21, 1-22, 2-22, 1-23, 2-23, 1-24, or 2-24 of any of the sequences in Table 2, Table 3, or Table 11. In certain embodiments, a MUC5AC RNAi agent antisense strand comprises or consists of a modified sequence of any one of the modified sequences in Table 3 or Table 11.

[0203] In some embodiments, a MUC5AC RNAi agent sense strand comprises the nucleotide sequence of any of the sequences in Table 2 or Table 4. In some embodiments, a MUC5AC RNAi agent sense strand comprises the sequence of nucleotides (from 5′ end→3′ end) 1-17, 2-17, 3-17, 4-17, 1-18, 2-18, 3-18, 4-18, 1-19, 2-19, 3-19, 4-19, 1-20, 2-20, 3-20, 4-20, 1-21, 2-21, 3-21, 4-21, 1-22, 2-22, 3-22, 4-22, 1-23, 2-23, 3-23, 4-23, 1-24, 2-24, 3-24, or 4-24, of any of the sequences in Table 2, Table 4, Table 5, Table 6, Table 7, or Table 11. In certain embodiments, a MUC5AC RNAi agent sense strand comprises or consists of a modified sequence of any one of the modified sequences in Table 3 or Table 11.

[0204] For the RNAi agents disclosed herein, the nucleotide at position 1 of the antisense strand (from 5′ end→3′ end) can be perfectly complementary to a MUC5AC gene, or can be non-complementary to a MUC5AC gene. In some embodiments, the nucleotide at position 1 of the antisense strand (from 5′ end→3′ end) is a U, A, or dT (or a modified version of U, A or dT). In some embodiments, the nucleotide at position 1 of the antisense strand (from 5′ end→3′ end) forms an A:U or U:A base pair with the sense strand.

[0205] In some embodiments, a MUC5AC RNAi agent antisense strand comprises the sequence of nucleotides (from 5′ end→3′ end) 2-18 or 2-19 of any of the antisense strand sequences in Table 2, Table 3, or Table 11. In some embodiments, a MUC5AC RNAi sense strand comprises the sequence of nucleotides (from 5′ end→3′ end) 1-17 or 1-18 of any of the sense strand sequences in Table 2, Table 4, Table 5, Table 6, Table 7, or Table 11.

[0206] In some embodiments, a MUC5AC RNAi agent includes (i) an antisense strand comprising the sequence of nucleotides (from 5′ end→3′ end) 2-18 or 2-19 of any of the antisense strand sequences in Table 2, Table 3, or Table 11, and (ii) a sense strand comprising the sequence of nucleotides (from 5′ end→3′ end) 1-17 or 1-18 of any of the sense strand sequences in Table 2, Table 4, Table 5, Table 6, Table 7, or Table 11.

[0207] A sense strand containing a sequence listed in Table 2 or Table 4 can be hybridized to any antisense strand containing a sequence listed in Table 2 or Table 3 provided the two sequences have a region of at least 85% complementarity over a contiguous 16, 17, 18, 19, 20, or 21 nucleotide sequence. In some embodiments, the MUC5AC RNAi agent has a sense strand consisting of the modified sequence of any of the modified sequences in Table 4, Table 5, Table 6, Table 7, or Table 11, and an antisense strand consisting of the modified sequence of any of the modified sequences in Table 3 or Table 11. Certain representative sequence pairings are exemplified by the Duplex ID Nos. shown in Tables 8A, 8B, 8C, 9, 10A and 10B.

[0208] In some embodiments, a MUC5AC RNAi agent comprises, consists of, or consists essentially of a duplex represented by any one of the Duplex ID Nos. presented herein. In some embodiments, a MUC5AC RNAi agent consists of any of the Duplex ID Nos. presented herein. In some embodiments, a MUC5AC RNAi agent comprises the sense strand and antisense strand nucleotide sequences of any of the Duplex ID Nos. presented herein. In some embodiments, a MUC5AC RNAi agent comprises the sense strand and antisense strand nucleotide sequences of any of the Duplex ID Nos. presented herein and a targeting group, linking group, and/or other non-nucleotide group wherein the targeting group, linking group, and/or other non-nucleotide group is covalently linked (i.e., conjugated) to the sense strand or the antisense strand. In some embodiments, a MUC5AC RNAi agent includes the sense strand and antisense strand modified nucleotide sequences of any of the Duplex ID Nos. presented herein. In some embodiments, a MUC5AC RNAi agent comprises the sense strand and antisense strand modified nucleotide sequences of any of the Duplex ID Nos. presented herein and a targeting group, linking group, and/or other non-nucleotide group, wherein the targeting group, linking group, and/or other non-nucleotide group is covalently linked to the sense strand or the antisense strand.

[0209] In some embodiments, a MUC5AC RNAi agent comprises an antisense strand and a sense strand having the nucleotide sequences of any of the antisense strand/sense strand duplexes of Tables 2, 8A, 8B, 8C, 9, 10A, 10B, or 11, and comprises a targeting group. In some embodiments, a MUC5AC RNAi agent comprises an antisense strand and a sense strand having the nucleotide sequences of any of the antisense strand/sense strand duplexes of Tables 2, 8A, 8B, 8C, 9, 10A, 10B, or 11, and comprises one or more αvβ6 integrin targeting ligands.

[0210] In some embodiments, a MUC5AC RNAi agent comprises an antisense strand and a sense strand having the nucleotide sequences of any of the antisense strand/sense strand duplexes of Tables 2, 8A, 8B, 8C, 9, 10A, 10B, or 11, and comprises a targeting group that is an integrin targeting ligand. In some embodiments, a MUC5AC RNAi agent comprises an antisense strand and a sense strand having the nucleotide sequences of any of the antisense strand/sense strand duplexes of Tables 2, 8A, 8B, 8C, 9, 10A, 10B, or 11, and comprises one or more αvβ6 integrin targeting ligands or clusters of αvβ6 integrin targeting ligands (e.g., a tridentate αvβ6 integrin targeting ligand).

[0211] In some embodiments, a MUC5AC RNAi agent comprises an antisense strand and a sense strand having the modified nucleotide sequences of any of the antisense strand/sense strand duplexes of Tables 8A, 8B, 8C, 9, 10A, 10B, and 11.

[0212] In some embodiments, a MUC5AC RNAi agent comprises an antisense strand and a sense strand having the modified nucleotide sequences of any of the antisense strand/sense strand duplexes of Tables 8A, 8B, 8C, 9, 10A, 10B, and 11, and comprises an integrin targeting ligand.

[0213] In some embodiments, a MUC5AC RNAi agent comprises, consists of, or consists essentially of any of the duplexes of Tables 8A, 8B, 8C, 9, 10A, 10B, and 11.

TABLE 8A
MUC5AC RNAi Agent Duplexes with Corresponding Sense and Antisense Strand ID Numbers
and Sequence ID numbers for the modified and unmodified nucleotide sequences.
(Shown without Linking Agents or Conjugates)

| | | AS | AS | | SS | SS |
|---|---|---|---|---|---|---|
| | | modified | unmodified | | modified | unmodified |
| Duplex | AS ID | SEQ ID NO: | SEQ ID NO: | SS ID | SEQ ID NO: | SEQ ID NO: |
| AD07626 | AM10579-AS | 1057 | 1517 | AM10578-SS-NL | 1192 | 1609 |
| AD07627 | AM10581-AS | 1058 | 1518 | AM10580-SS-NL | 1193 | 1610 |
| AD07628 | AM10583-AS | 1059 | 1519 | AM10582-SS-NL | 1194 | 1611 |
| AD07629 | AM10585-AS | 1060 | 1520 | AM10584-SS-NL | 1195 | 1612 |
| AD07630 | AM10587-AS | 1061 | 1521 | AM10586-SS-NL | 1196 | 1613 |
| AD07631 | AM10589-AS | 1062 | 1522 | AM10588-SS-NL | 1197 | 1614 |
| AD07632 | AM10591-AS | 1063 | 1523 | AM10590-SS-NL | 1198 | 1615 |
| AD07633 | AM10593-AS | 1064 | 1524 | AM10592-SS-NL | 1199 | 1616 |
| AD07634 | AM10595-AS | 1065 | 1525 | AM10594-SS-NL | 1200 | 1617 |
| AD07635 | AM10597-AS | 1066 | 1526 | AM10596-SS-NL | 1201 | 1618 |
| AD07636 | AM10599-AS | 1067 | 1527 | AM10598-SS-NL | 1202 | 1619 |
| AD07637 | AM10601-AS | 1068 | 1528 | AM10600-SS-NL | 1203 | 1620 |
| AD07638 | AM10603-AS | 1069 | 1529 | AM10602-SS-NL | 1204 | 1621 |
| AD07639 | AM10605-AS | 1070 | 1529 | AM10604-SS-NL | 1205 | 1622 |
| AD07716 | AM10739-AS | 1071 | 1530 | AM10738-SS-NL | 1206 | 1623 |
| AD07717 | AM10741-AS | 1072 | 1530 | AM10740-SS-NL | 1207 | 1624 |
| AD07718 | AM10743-AS | 1073 | 1531 | AM10742-SS-NL | 1208 | 1625 |
| AD07719 | AM10744-AS | 1074 | 1531 | AM10742-SS-NL | 1208 | 1625 |
| AD07720 | AM10743-AS | 1073 | 1531 | AM10745-SS-NL | 1209 | 1626 |
| AD07721 | AM10747-AS | 1075 | 1532 | AM10746-SS-NL | 1210 | 1627 |
| AD07722 | AM10747-AS | 1075 | 1532 | AM10748-SS-NL | 1211 | 1628 |
| AD07723 | AM10747-AS | 1075 | 1532 | AM10749-SS-NL | 1212 | 1629 |
| AD07731 | AM10764-AS | 1076 | 1533 | AM10763-SS-NL | 1213 | 1630 |
| AD07732 | AM10766-AS | 1077 | 1534 | AM10765-SS-NL | 1214 | 1631 |
| AD07733 | AM10768-AS | 1078 | 1535 | AM10767-SS-NL | 1215 | 1632 |
| AD07734 | AM10770-AS | 1079 | 1536 | AM10769-SS-NL | 1216 | 1633 |
| AD07735 | AM10772-AS | 1080 | 1537 | AM10771-SS-NL | 1217 | 1634 |
| AD07744 | AM10790-AS | 1081 | 1538 | AM10789-SS-NL | 1218 | 1635 |
| AD07745 | AM10792-AS | 1082 | 1539 | AM10791-SS-NL | 1219 | 1636 |
| AD07746 | AM10794-AS | 1083 | 1540 | AM10793-SS-NL | 1220 | 1637 |
| AD07747 | AM10796-AS | 1084 | 1541 | AM10795-SS-NL | 1221 | 1638 |
| AD07748 | AM10798-AS | 1085 | 1542 | AM10797-SS-NL | 1222 | 1639 |
| AD07749 | AM10800-AS | 1086 | 1543 | AM10799-SS-NL | 1223 | 1640 |
| AD07750 | AM10802-AS | 1087 | 1544 | AM10801-SS-NL | 1224 | 1641 |
| AD07751 | AM10804-AS | 1088 | 1545 | AM10803-SS-NL | 1225 | 1642 |
| AD07752 | AM10806-AS | 1089 | 1546 | AM10805-SS-NL | 1226 | 1643 |
| AD07753 | AM10808-AS | 1090 | 1530 | AM10807-SS-NL | 1227 | 1623 |
| AD07754 | AM10810-AS | 1091 | 1547 | AM10809-SS-NL | 1228 | 1644 |
| AD07755 | AM10812-AS | 1092 | 1548 | AM10811-SS-NL | 1229 | 1645 |
| AD07756 | AM10814-AS | 1093 | 1549 | AM10813-SS-NL | 1230 | 1646 |
| AD07757 | AM10816-AS | 1094 | 1550 | AM10815-SS-NL | 1231 | 1647 |
| AD07758 | AM10818-AS | 1095 | 1532 | AM10817-SS-NL | 1232 | 1627 |
| AD07760 | AM10821-AS | 1096 | 1551 | AM10820-SS-NL | 1234 | 1648 |
| AD07761 | AM10823-AS | 1097 | 1552 | AM10822-SS-NL | 1235 | 1649 |
| AD07762 | AM10825-AS | 1098 | 1553 | AM10824-SS-NL | 1236 | 1650 |
| AD07763 | AM10827-AS | 1099 | 1554 | AM10826-SS-NL | 1237 | 1651 |
| AD07764 | AM10829-AS | 1100 | 1555 | AM10828-SS-NL | 1238 | 1652 |
| AD07765 | AM10831-AS | 1101 | 1556 | AM10830-SS-NL | 1239 | 1653 |
| AD07766 | AM10833-AS | 1102 | 1557 | AM10832-SS-NL | 1240 | 1654 |
| AD07767 | AM10835-AS | 1103 | 1558 | AM10834-SS-NL | 1241 | 1655 |
| AD07768 | AM10837-AS | 1104 | 1559 | AM10836-SS-NL | 1242 | 1656 |
| AD07769 | AM10839-AS | 1105 | 1560 | AM10838-SS-NL | 1243 | 1657 |
| AD07770 | AM10841-AS | 1106 | 1561 | AM10840-SS-NL | 1244 | 1658 |
| AD07771 | AM10843-AS | 1107 | 1562 | AM10842-SS-NL | 1245 | 1659 |
| AD07772 | AM10845-AS | 1108 | 1563 | AM10844-SS-NL | 1246 | 1660 |
| AD07773 | AM10847-AS | 1109 | 1564 | AM10846-SS-NL | 1247 | 1661 |
| AD07774 | AM10849-AS | 1110 | 1565 | AM10848-SS-NL | 1248 | 1662 |
| AD07941 | AM11065-AS | 1111 | 1531 | AM10819-SS-NL | 1233 | 1625 |
| AD08083 | AM11264-AS | 1112 | 1566 | AM11263-SS-NL | 1250 | 1663 |
| AD08084 | AM11264-AS | 1112 | 1566 | AM11265-SS-NL | 1251 | 1664 |
| AD08085 | AM11266-AS | 1113 | 1566 | AM11263-SS-NL | 1250 | 1663 |
| AD08086 | AM11268-AS | 1114 | 1567 | AM11267-SS-NL | 1252 | 1665 |
| AD08087 | AM11268-AS | 1114 | 1567 | AM11269-SS-NL | 1253 | 1666 |
| AD08088 | AM11271-AS | 1115 | 1568 | AM11270-SS-NL | 1254 | 1667 |
| AD08089 | AM11272-AS | 1116 | 1568 | AM11270-SS-NL | 1254 | 1667 |
| AD08094 | AM11275-AS | 1117 | 1569 | AM11274-SS-NL | 1255 | 1668 |
| AD08095 | AM11277-AS | 1118 | 1570 | AM11276-SS-NL | 1256 | 1669 |
| AD08096 | AM11279-AS | 1119 | 1571 | AM11278-SS-NL | 1257 | 1670 |
| AD08097 | AM11281-AS | 1120 | 1572 | AM11280-SS-NL | 1258 | 1671 |
| AD08098 | AM11283-AS | 1121 | 1573 | AM11282-SS-NL | 1259 | 1672 |
| AD08099 | AM11285-AS | 1122 | 1574 | AM11284-SS-NL | 1260 | 1673 |
| AD08100 | AM11287-AS | 1123 | 1575 | AM11286-SS-NL | 1261 | 1674 |
| AD08101 | AM11289-AS | 1124 | 1576 | AM11288-SS-NL | 1262 | 1675 |
| AD08102 | AM11291-AS | 1125 | 1577 | AM11290-SS-NL | 1263 | 1676 |
| AD08103 | AM11293-AS | 1126 | 1578 | AM11292-SS-NL | 1264 | 1677 |
| AD08173 | AM10595-AS | 1065 | 1525 | AM11400-SS-NL | 1265 | 1617 |
| AD08174 | AM11401-AS | 1127 | 1525 | AM11400-SS-NL | 1265 | 1617 |
| AD08175 | AM11403-AS | 1128 | 1579 | AM11402-SS-NL | 1266 | 1678 |
| AD08176 | AM11404-AS | 1129 | 1579 | AM11402-SS-NL | 1266 | 1678 |
| AD08177 | AM11405-AS | 1130 | 1579 | AM11402-SS-NL | 1266 | 1678 |
| AD08224 | AM11464-AS | 1132 | 1581 | AM11463-SS-NL | 1267 | 1679 |
| AD08225 | AM11465-AS | 1133 | 1581 | AM11463-SS-NL | 1267 | 1679 |
| AD08226 | AM11467-AS | 1134 | 1582 | AM11466-SS-NL | 1268 | 1680 |
| AD08227 | AM11469-AS | 1135 | 1583 | AM11468-SS-NL | 1269 | 1681 |
| AD08228 | AM11471-AS | 1136 | 1584 | AM11470-SS-NL | 1270 | 1682 |
| AD08229 | AM11473-AS | 1137 | 1585 | AM11472-SS-NL | 1271 | 1683 |
| AD08230 | AM11475-AS | 1138 | 1586 | AM11474-SS-NL | 1272 | 1684 |
| AD08231 | AM11477-AS | 1139 | 1587 | AM11476-SS-NL | 1273 | 1685 |
| AD08232 | AM11479-AS | 1140 | 1588 | AM11478-SS-NL | 1274 | 1686 |
| AD08233 | AM11481-AS | 1141 | 1589 | AM11480-SS-NL | 1275 | 1687 |
| AD08243 | AM11495-AS | 1142 | 1590 | AM11400-SS-NL | 1265 | 1617 |
| AD08244 | AM11496-AS | 1143 | 1525 | AM11400-SS-NL | 1265 | 1617 |
| AD08245 | AM11498-AS | 1144 | 1591 | AM11497-SS-NL | 1276 | 1688 |
| AD08246 | AM11499-AS | 1145 | 1591 | AM11497-SS-NL | 1276 | 1688 |
| AD08420 | AM11742-AS | 1148 | 1566 | AM11265-SS-NL | 1251 | 1664 |
| AD08421 | AM11742-AS | 1148 | 1566 | AM11263-SS-NL | 1250 | 1663 |
| AD08422 | AM11742-AS | 1148 | 1566 | AM11743-SS-NL | 1278 | 1664 |
| AD08423 | AM11272-AS | 1116 | 1568 | AM11744-SS-NL | 1279 | 1667 |
| AD08424 | AM11745-AS | 1149 | 1568 | AM11744-SS-NL | 1279 | 1667 |
| AD08468 | AM11821-AS | 1150 | 1589 | AM11480-SS-NL | 1275 | 1687 |
| AD08469 | AM11823-AS | 1151 | 1589 | AM11822-SS-NL | 1280 | 1687 |
| AD08470 | AM11825-AS | 1152 | 1593 | AM11824-SS-NL | 1281 | 1690 |
| AD08564 | AM11971-AS | 1153 | 1594 | AM11970-SS-NL | 1282 | 1691 |
| AD08565 | AM11973-AS | 1154 | 1595 | AM11972-SS-NL | 1283 | 1692 |
| AD08566 | AM11975-AS | 1155 | 1596 | AM11974-SS-NL | 1284 | 1693 |
| AD08567 | AM11977-AS | 1156 | 1597 | AM11976-SS-NL | 1285 | 1694 |
| AD08568 | AM11979-AS | 1157 | 1598 | AM11978-SS-NL | 1286 | 1695 |
| AD08569 | AM07100-AS | 1716 | 1566 | AM11980-SS-NL | 1287 | 1664 |
| AD08570 | AM11982-AS | 1158 | 1599 | AM11981-SS-NL | 1288 | 1696 |
| AD08571 | AM11984-AS | 1159 | 1600 | AM11983-SS-NL | 1289 | 1697 |
| AD08572 | AM07104-AS | 1717 | 1568 | AM11985-SS-NL | 1290 | 1667 |
| AD08573 | AM11986-AS | 1160 | 1568 | AM11985-SS-NL | 1290 | 1667 |
| AD08662 | AM12158-AS | 1161 | 1601 | AM12157-SS-NL | 1291 | 1698 |
| AD08663 | AM12159-AS | 1162 | 1601 | AM12157-SS-NL | 1291 | 1698 |
| AD08664 | AM12161-AS | 1163 | 1601 | AM12160-SS-NL | 1292 | 1698 |
| AD08665 | AM12162-AS | 1164 | 1601 | AM12160-SS-NL | 1292 | 1698 |
| AD08666 | AM12163-AS | 1165 | 1535 | AM10767-SS-NL | 1215 | 1632 |
| AD08667 | AM12165-AS | 1166 | 1535 | AM12164-SS-NL | 1293 | 1632 |
| AD08668 | AM12166-AS | 1167 | 1535 | AM12164-SS-NL | 1293 | 1632 |
| AD08669 | AM12167-AS | 1168 | 1535 | AM12164-SS-NL | 1293 | 1632 |
| AD08670 | AM12167-AS | 1168 | 1535 | AM12168-SS-NL | 1294 | 1699 |
| AD08671 | AM12169-AS | 1169 | 1571 | AM11278-SS-NL | 1257 | 1670 |
| AD08672 | AM12171-AS | 1170 | 1571 | AM12170-SS-NL | 1295 | 1670 |
| AD08673 | AM12172-AS | 1171 | 1571 | AM12170-SS-NL | 1295 | 1670 |
| AD08674 | AM12173-AS | 1172 | 1534 | AM10765-SS-NL | 1214 | 1631 |
| AD08675 | AM12175-AS | 1173 | 1534 | AM12174-SS-NL | 1296 | 1631 |
| AD08676 | AM12176-AS | 1174 | 1534 | AM12174-SS-NL | 1296 | 1631 |
| AD08677 | AM12177-AS | 1175 | 1534 | AM12174-SS-NL | 1296 | 1631 |
| AD08678 | AM12178-AS | 1176 | 1568 | AM11270-SS-NL | 1254 | 1667 |
| AD08679 | AM12178-AS | 1176 | 1568 | AM12179-SS-NL | 1297 | 1700 |
| AD08680 | AM12180-AS | 1177 | 1568 | AM11270-SS-NL | 1254 | 1667 |
| AD08681 | AM12181-AS | 1178 | 1568 | AM11270-SS-NL | 1254 | 1667 |
| AD08682 | AM12182-AS | 1179 | 1602 | AM11270-SS-NL | 1254 | 1667 |
| AD08687 | AM12189-AS | 1180 | 1603 | AM12188-SS-NL | 1298 | 1701 |
| AD08688 | AM12191-AS | 1181 | 1604 | AM12190-SS-NL | 1299 | 1702 |
| AD08689 | AM12193-AS | 1182 | 1605 | AM12192-SS-NL | 1300 | 1703 |
| AD08690 | AM12195-AS | 1183 | 1606 | AM12194-SS-NL | 1301 | 1704 |
| AD08691 | AM12197-AS | 1184 | 1607 | AM12196-SS-NL | 1302 | 1705 |
| AD08692 | AM12197-AS | 1184 | 1607 | AM12198-SS-NL | 1303 | 1706 |
| AD08889 | AM11401-AS | 1127 | 1525 | AM10594-SS-NL | 1200 | 1617 |
| AD08890 | AM12516-AS | 1185 | 1525 | AM12515-SS-NL | 1304 | 1617 |
| AD08891 | AM12516-AS | 1185 | 1525 | AM12517-SS-NL | 1305 | 1617 |
| AD08892 | AM12516-AS | 1185 | 1525 | AM12518-SS-NL | 1306 | 1617 |
| AD08893 | AM12519-AS | 1186 | 1525 | AM12518-SS-NL | 1306 | 1617 |
| AD08894 | AM12516-AS | 1185 | 1525 | AM12520-SS-NL | 1307 | 1707 |
| AD08895 | AM12516-AS | 1185 | 1525 | AM12521-SS-NL | 1308 | 1708 |
| AD08896 | AM12516-AS | 1185 | 1525 | AM12522-SS-NL | 1309 | 1709 |
| AD08897 | AM12516-AS | 1185 | 1525 | AM12523-SS-NL | 1310 | 1617 |
| AD08951 | AM12165-AS | 1166 | 1535 | AM12605-SS-NL | 1311 | 1632 |
| AD08952 | AM12165-AS | 1166 | 1535 | AM12606-SS-NL | 1312 | 1632 |
| AD08953 | AM12608-AS | 1187 | 1608 | AM12607-SS-NL | 1313 | 1710 |
| AD08954 | AM12609-AS | 1188 | 1535 | AM12164-SS-NL | 1293 | 1632 |
| AD08955 | AM12610-AS | 1189 | 1535 | AM12164-SS-NL | 1293 | 1632 |
| AD08956 | AM12611-AS | 1190 | 1535 | AM12164-SS-NL | 1293 | 1632 |
| AD08957 | AM12612-AS | 1191 | 1535 | AM12164-SS-NL | 1293 | 1632 |
| AD09240 | AM12165-AS | 1166 | 1535 | AM13074-SS-NL | 1315 | 1632 |
| AD09241 | AM12612-AS | 1191 | 1535 | AM13074-SS-NL | 1315 | 1632 |
| AD09863 | AM11401-AS | 1127 | 1525 | AM14080-SS-NL | 1316 | 1617 |
| AD09864 | AM11401-AS | 1127 | 1525 | AM14081-SS-NL | 1317 | 1711 |
| AD09865 | AM11401-AS | 1127 | 1525 | AM14084-SS-NL | 1318 | 1712 |

TABLE 8B
MUC5AC RNAi Agent Duplexes with Corresponding Sense and Antisense Strand ID Numbers
and Sequence ID numbers for the modified and unmodified nucleotide sequences.)

| | | AS | AS | | SS | SS |
|---|---|---|---|---|---|---|
| | | modified | unmodified | | modified | unmodified |
| Duplex | AS ID | SEQ ID NO: | SEQ ID NO: | SS ID | SEQ ID NO: | SEQ ID NO: |
| AD07626 | AM10579-AS | 1057 | 1517 | AM10578-SS | 1319 | 1609 |
| AD07627 | AM10581-AS | 1058 | 1518 | AM10580-SS | 1320 | 1610 |
| AD07628 | AM10583-AS | 1059 | 1519 | AM10582-SS | 1321 | 1611 |
| AD07629 | AM10585-AS | 1060 | 1520 | AM10584-SS | 1322 | 1612 |
| AD07630 | AM10587-AS | 1061 | 1521 | AM10586-SS | 1323 | 1613 |
| AD07631 | AM10589-AS | 1062 | 1522 | AM10588-SS | 1324 | 1614 |
| AD07632 | AM10591-AS | 1063 | 1523 | AM10590-SS | 1325 | 1615 |
| AD07633 | AM10593-AS | 1064 | 1524 | AM10592-SS | 1326 | 1616 |
| AD07634 | AM10595-AS | 1065 | 1525 | AM10594-SS | 1327 | 1617 |
| AD07635 | AM10597-AS | 1066 | 1526 | AM10596-SS | 1328 | 1618 |
| AD07636 | AM10599-AS | 1067 | 1527 | AM10598-SS | 1329 | 1619 |
| AD07637 | AM10601-AS | 1068 | 1528 | AM10600-SS | 1330 | 1620 |
| AD07638 | AM10603-AS | 1069 | 1529 | AM10602-SS | 1331 | 1621 |
| AD07639 | AM10605-AS | 1070 | 1529 | AM10604-SS | 1332 | 1622 |
| AD07716 | AM10739-AS | 1071 | 1530 | AM10738-SS | 1333 | 1623 |
| AD07717 | AM10741-AS | 1072 | 1530 | AM10740-SS | 1334 | 1624 |
| AD07718 | AM10743-AS | 1073 | 1531 | AM10742-SS | 1335 | 1625 |
| AD07719 | AM10744-AS | 1074 | 1531 | AM10742-SS | 1335 | 1625 |
| AD07720 | AM10743-AS | 1073 | 1531 | AM10745-SS | 1336 | 1626 |
| AD07721 | AM10747-AS | 1075 | 1532 | AM10746-SS | 1337 | 1627 |
| AD07722 | AM10747-AS | 1075 | 1532 | AM10748-SS | 1338 | 1628 |
| AD07723 | AM10747-AS | 1075 | 1532 | AM10749-SS | 1339 | 1629 |
| AD07731 | AM10764-AS | 1076 | 1533 | AM10763-SS | 1340 | 1630 |
| AD07732 | AM10766-AS | 1077 | 1534 | AM10765-SS | 1341 | 1631 |
| AD07733 | AM10768-AS | 1078 | 1535 | AM10767-SS | 1342 | 1632 |
| AD07734 | AM10770-AS | 1079 | 1536 | AM10769-SS | 1343 | 1633 |
| AD07735 | AM10772-AS | 1080 | 1537 | AM10771-SS | 1344 | 1634 |
| AD07744 | AM10790-AS | 1081 | 1538 | AM10789-SS | 1345 | 1635 |
| AD07745 | AM10792-AS | 1082 | 1539 | AM10791-SS | 1346 | 1636 |
| AD07746 | AM10794-AS | 1083 | 1540 | AM10793-SS | 1347 | 1637 |
| AD07747 | AM10796-AS | 1084 | 1541 | AM10795-SS | 1348 | 1638 |
| AD07748 | AM10798-AS | 1085 | 1542 | AM10797-SS | 1349 | 1639 |
| AD07749 | AM10800-AS | 1086 | 1543 | AM10799-SS | 1350 | 1640 |
| AD07750 | AM10802-AS | 1087 | 1544 | AM10801-SS | 1351 | 1641 |
| AD07751 | AM10804-AS | 1088 | 1545 | AM10803-SS | 1352 | 1642 |
| AD07752 | AM10806-AS | 1089 | 1546 | AM10805-SS | 1353 | 1643 |
| AD07753 | AM10808-AS | 1090 | 1530 | AM10807-SS | 1354 | 1623 |
| AD07754 | AM10810-AS | 1091 | 1547 | AM10809-SS | 1355 | 1644 |
| AD07755 | AM10812-AS | 1092 | 1548 | AM10811-SS | 1356 | 1645 |
| AD07756 | AM10814-AS | 1093 | 1549 | AM10813-SS | 1357 | 1646 |
| AD07757 | AM10816-AS | 1094 | 1550 | AM10815-SS | 1358 | 1647 |
| AD07758 | AM10818-AS | 1095 | 1532 | AM10817-SS | 1359 | 1627 |
| AD07760 | AM10821-AS | 1096 | 1551 | AM10820-SS | 1361 | 1648 |
| AD07761 | AM10823-AS | 1097 | 1552 | AM10822-SS | 1362 | 1649 |
| AD07762 | AM10825-AS | 1098 | 1553 | AM10824-SS | 1363 | 1650 |
| AD07763 | AM10827-AS | 1099 | 1554 | AM10826-SS | 1364 | 1651 |
| AD07764 | AM10829-AS | 1100 | 1555 | AM10828-SS | 1365 | 1652 |
| AD07765 | AM10831-AS | 1101 | 1556 | AM10830-SS | 1366 | 1653 |
| AD07766 | AM10833-AS | 1102 | 1557 | AM10832-SS | 1367 | 1654 |
| AD07767 | AM10835-AS | 1103 | 1558 | AM10834-SS | 1368 | 1655 |
| AD07768 | AM10837-AS | 1104 | 1559 | AM10836-SS | 1369 | 1656 |
| AD07769 | AM10839-AS | 1105 | 1560 | AM10838-SS | 1370 | 1657 |
| AD07770 | AM10841-AS | 1106 | 1561 | AM10840-SS | 1371 | 1658 |
| AD07771 | AM10843-AS | 1107 | 1562 | AM10842-SS | 1372 | 1659 |
| AD07772 | AM10845-AS | 1108 | 1563 | AM10844-SS | 1373 | 1660 |
| AD07773 | AM10847-AS | 1109 | 1564 | AM10846-SS | 1374 | 1661 |
| AD07774 | AM10849-AS | 1110 | 1565 | AM10848-SS | 1375 | 1662 |
| AD07941 | AM11065-AS | 1111 | 1531 | AM10819-SS | 1360 | 1625 |
| AD08083 | AM11264-AS | 1112 | 1566 | AM11263-SS | 1377 | 1663 |
| AD08084 | AM11264-AS | 1112 | 1566 | AM11265-SS | 1378 | 1664 |
| AD08085 | AM11266-AS | 1113 | 1566 | AM11263-SS | 1377 | 1663 |
| AD08086 | AM11268-AS | 1114 | 1567 | AM11267-SS | 1379 | 1665 |
| AD08087 | AM11268-AS | 1114 | 1567 | AM11269-SS | 1380 | 1666 |
| AD08088 | AM11271-AS | 1115 | 1568 | AM11270-SS | 1381 | 1667 |
| AD08089 | AM11272-AS | 1116 | 1568 | AM11270-SS | 1381 | 1667 |
| AD08094 | AM11275-AS | 1117 | 1569 | AM11274-SS | 1382 | 1668 |
| AD08095 | AM11277-AS | 1118 | 1570 | AM11276-SS | 1383 | 1669 |
| AD08096 | AM11279-AS | 1119 | 1571 | AM11278-SS | 1384 | 1670 |
| AD08097 | AM11281-AS | 1120 | 1572 | AM11280-SS | 1385 | 1671 |
| AD08098 | AM11283-AS | 1121 | 1573 | AM11282-SS | 1386 | 1672 |
| AD08099 | AM11285-AS | 1122 | 1574 | AM11284-SS | 1387 | 1673 |
| AD08100 | AM11287-AS | 1123 | 1575 | AM11286-SS | 1388 | 1674 |
| AD08101 | AM11289-AS | 1124 | 1576 | AM11288-SS | 1389 | 1675 |
| AD08102 | AM11291-AS | 1125 | 1577 | AM11290-SS | 1390 | 1676 |
| AD08103 | AM11293-AS | 1126 | 1578 | AM11292-SS | 1391 | 1677 |
| AD08173 | AM10595-AS | 1065 | 1525 | AM11400-SS | 1392 | 1617 |
| AD08174 | AM11401-AS | 1127 | 1525 | AM11400-SS | 1392 | 1617 |
| AD08175 | AM11403-AS | 1128 | 1579 | AM11402-SS | 1393 | 1678 |
| AD08176 | AM11404-AS | 1129 | 1579 | AM11402-SS | 1393 | 1678 |
| AD08177 | AM11405-AS | 1130 | 1579 | AM11402-SS | 1393 | 1678 |
| AD08224 | AM11464-AS | 1132 | 1581 | AM11463-SS | 1394 | 1679 |
| AD08225 | AM11465-AS | 1133 | 1581 | AM11463-SS | 1394 | 1679 |
| AD08226 | AM11467-AS | 1134 | 1582 | AM11466-SS | 1395 | 1680 |
| AD08227 | AM11469-AS | 1135 | 1583 | AM11468-SS | 1396 | 1681 |
| AD08228 | AM11471-AS | 1136 | 1584 | AM11470-SS | 1397 | 1682 |
| AD08229 | AM11473-AS | 1137 | 1585 | AM11472-SS | 1398 | 1683 |
| AD08230 | AM11475-AS | 1138 | 1586 | AM11474-SS | 1399 | 1684 |
| AD08231 | AM11477-AS | 1139 | 1587 | AM11476-SS | 1400 | 1685 |
| AD08232 | AM11479-AS | 1140 | 1588 | AM11478-SS | 1401 | 1686 |
| AD08233 | AM11481-AS | 1141 | 1589 | AM11480-SS | 1402 | 1687 |
| AD08243 | AM11495-AS | 1142 | 1590 | AM11400-SS | 1392 | 1617 |
| AD08244 | AM11496-AS | 1143 | 1525 | AM11400-SS | 1392 | 1617 |
| AD08245 | AM11498-AS | 1144 | 1591 | AM11497-SS | 1403 | 1688 |
| AD08246 | AM11499-AS | 1145 | 1591 | AM11497-SS | 1403 | 1688 |
| AD08420 | AM11742-AS | 1148 | 1566 | AM11265-SS | 1378 | 1664 |
| AD08421 | AM11742-AS | 1148 | 1566 | AM11263-SS | 1377 | 1663 |
| AD08422 | AM11742-AS | 1148 | 1566 | AM11743-SS | 1405 | 1664 |
| AD08423 | AM11272-AS | 1116 | 1568 | AM11744-SS | 1406 | 1667 |
| AD08424 | AM11745-AS | 1149 | 1568 | AM11744-SS | 1406 | 1667 |
| AD08468 | AM11821-AS | 1150 | 1589 | AM11480-SS | 1402 | 1687 |
| AD08469 | AM11823-AS | 1151 | 1589 | AM11822-SS | 1407 | 1687 |
| AD08470 | AM11825-AS | 1152 | 1593 | AM11824-SS | 1408 | 1690 |
| AD08564 | AM11971-AS | 1153 | 1594 | AM11970-SS | 1409 | 1691 |
| AD08565 | AM11973-AS | 1154 | 1595 | AM11972-SS | 1410 | 1692 |
| AD08566 | AM11975-AS | 1155 | 1596 | AM11974-SS | 1411 | 1693 |
| AD08567 | AM11977-AS | 1156 | 1597 | AM11976-SS | 1412 | 1694 |
| AD08568 | AM11979-AS | 1157 | 1598 | AM11978-SS | 1413 | 1695 |
| AD08569 | AM07100-AS | 1716 | 1566 | AM11980-SS | 1414 | 1664 |
| AD08570 | AM11982-AS | 1158 | 1599 | AM11981-SS | 1415 | 1696 |
| AD08571 | AM11984-AS | 1159 | 1600 | AM11983-SS | 1416 | 1697 |
| AD08572 | AM07104-AS | 1717 | 1568 | AM11985-SS | 1417 | 1667 |
| AD08573 | AM11986-AS | 1160 | 1568 | AM11985-SS | 1417 | 1667 |
| AD08662 | AM12158-AS | 1161 | 1601 | AM12157-SS | 1418 | 1698 |
| AD08663 | AM12159-AS | 1162 | 1601 | AM12157-SS | 1418 | 1698 |
| AD08664 | AM12161-AS | 1163 | 1601 | AM12160-SS | 1419 | 1698 |
| AD08665 | AM12162-AS | 1164 | 1601 | AM12160-SS | 1419 | 1698 |
| AD08666 | AM12163-AS | 1165 | 1535 | AM10767-SS | 1342 | 1632 |
| AD08667 | AM12165-AS | 1166 | 1535 | AM12164-SS | 1420 | 1632 |
| AD08668 | AM12166-AS | 1167 | 1535 | AM12164-SS | 1420 | 1632 |
| AD08669 | AM12167-AS | 1168 | 1535 | AM12164-SS | 1420 | 1632 |
| AD08670 | AM12167-AS | 1168 | 1535 | AM12168-SS | 1421 | 1699 |
| AD08671 | AM12169-AS | 1169 | 1571 | AM11278-SS | 1384 | 1670 |
| AD08672 | AM12171-AS | 1170 | 1571 | AM12170-SS | 1422 | 1670 |
| AD08673 | AM12172-AS | 1171 | 1571 | AM12170-SS | 1422 | 1670 |
| AD08674 | AM12173-AS | 1172 | 1534 | AM10765-SS | 1341 | 1631 |
| AD08675 | AM12175-AS | 1173 | 1534 | AM12174-SS | 1423 | 1631 |
| AD08676 | AM12176-AS | 1174 | 1534 | AM12174-SS | 1423 | 1631 |
| AD08677 | AM12177-AS | 1175 | 1534 | AM12174-SS | 1423 | 1631 |
| AD08678 | AM12178-AS | 1176 | 1568 | AM11270-SS | 1381 | 1667 |
| AD08679 | AM12178-AS | 1176 | 1568 | AM12179-SS | 1424 | 1700 |
| AD08680 | AM12180-AS | 1177 | 1568 | AM11270-SS | 1381 | 1667 |
| AD08681 | AM12181-AS | 1178 | 1568 | AM11270-SS | 1381 | 1667 |
| AD08682 | AM12182-AS | 1179 | 1602 | AM11270-SS | 1381 | 1667 |
| AD08687 | AM12189-AS | 1180 | 1603 | AM12188-SS | 1425 | 1701 |
| AD08688 | AM12191-AS | 1181 | 1604 | AM12190-SS | 1426 | 1702 |
| AD08689 | AM12193-AS | 1182 | 1605 | AM12192-SS | 1427 | 1703 |
| AD08690 | AM12195-AS | 1183 | 1606 | AM12194-SS | 1428 | 1704 |
| AD08691 | AM12197-AS | 1184 | 1607 | AM12196-SS | 1429 | 1705 |
| AD08692 | AM12197-AS | 1184 | 1607 | AM12198-SS | 1430 | 1706 |
| AD08889 | AM11401-AS | 1127 | 1525 | AM10594-SS | 1327 | 1617 |
| AD08890 | AM12516-AS | 1185 | 1525 | AM12515-SS | 1431 | 1617 |
| AD08891 | AM12516-AS | 1185 | 1525 | AM12517-SS | 1432 | 1617 |
| AD08892 | AM12516-AS | 1185 | 1525 | AM12518-SS | 1433 | 1617 |
| AD08893 | AM12519-AS | 1186 | 1525 | AM12518-SS | 1433 | 1617 |
| AD08894 | AM12516-AS | 1185 | 1525 | AM12520-SS | 1434 | 1707 |
| AD08895 | AM12516-AS | 1185 | 1525 | AM12521-SS | 1435 | 1708 |
| AD08896 | AM12516-AS | 1185 | 1525 | AM12522-SS | 1436 | 1709 |
| AD08897 | AM12516-AS | 1185 | 1525 | AM12523-SS | 1437 | 1617 |
| AD08951 | AM12165-AS | 1166 | 1535 | AM12605-SS | 1438 | 1632 |
| AD08952 | AM12165-AS | 1166 | 1535 | AM12606-SS | 1439 | 1632 |
| AD08953 | AM12608-AS | 1187 | 1608 | AM12607-SS | 1440 | 1710 |
| AD08954 | AM12609-AS | 1188 | 1535 | AM12164-SS | 1420 | 1632 |
| AD08955 | AM12610-AS | 1189 | 1535 | AM12164-SS | 1420 | 1632 |
| AD08956 | AM12611-AS | 1190 | 1535 | AM12164-SS | 1420 | 1632 |
| AD08957 | AM12612-AS | 1191 | 1535 | AM12164-SS | 1420 | 1632 |
| AD09240 | AM12165-AS | 1166 | 1535 | AM13074-SS | 1441 | 1632 |
| AD09241 | AM12612-AS | 1191 | 1535 | AM13074-SS | 1441 | 1632 |
| AD09863 | AM11401-AS | 1127 | 1525 | AM14080-SS | 1442 | 1617 |
| AD09864 | AM11401-AS | 1127 | 1525 | AM14081-SS | 1443 | 1711 |
| AD09865 | AM11401-AS | 1127 | 1525 | AM14084-SS | 1444 | 1712 |

TABLE 8C
MUC5AC RNAi Agent Duplexes with Corresponding Sense and Antisense
Strand ID Numbers and Sequence ID numbers for certain modified
and unmodified nucleotide sequences tested in vitro.

| | | AS | AS | | SS | SS |
|---|---|---|---|---|---|---|
| | | modified | unmodified | | modified | unmodified |
| Duplex | AS ID | SEQ ID NO: | SEQ ID NO: | SS ID | SEQ ID NO: | SEQ ID NO: |
| AD07634 | AM10595-AS | 1065 | 1525 | AM10594-SS-S | 1445 | 1617 |
| AD07637 | AM10601-AS | 1068 | 1528 | AM10600-SS-S | 1446 | 1620 |
| AD07732 | AM10766-AS | 1077 | 1534 | AM10765-SS-S | 1447 | 1631 |
| AD07733 | AM10768-AS | 1078 | 1535 | AM10767-SS-S | 1448 | 1632 |
| AD07734 | AM10770-AS | 1079 | 1536 | AM10769-SS-S | 1449 | 1633 |
| AD07735 | AM10772-AS | 1080 | 1537 | AM10771-SS-S | 1450 | 1634 |
| AD07745 | AM10792-AS | 1082 | 1539 | AM10791-SS-S | 1451 | 1636 |
| AD07746 | AM10794-AS | 1083 | 1540 | AM10793-SS-S | 1452 | 1637 |
| AD07747 | AM10796-AS | 1084 | 1541 | AM10795-SS-S | 1453 | 1638 |
| AD07748 | AM10798-AS | 1085 | 1542 | AM10797-SS-S | 1454 | 1639 |
| AD07749 | AM10800-AS | 1086 | 1543 | AM10799-SS-S | 1455 | 1640 |
| AD07750 | AM10802-AS | 1087 | 1544 | AM10801-SS-S | 1456 | 1641 |
| AD07751 | AM10804-AS | 1088 | 1545 | AM10803-SS-S | 1457 | 1642 |
| AD07756 | AM10814-AS | 1093 | 1549 | AM10813-SS-S | 1458 | 1646 |
| AD07760 | AM10821-AS | 1096 | 1551 | AM10820-SS-S | 1459 | 1648 |
| AD07763 | AM10827-AS | 1099 | 1554 | AM10826-SS-S | 1460 | 1651 |
| AD07764 | AM10829-AS | 1100 | 1555 | AM10828-SS-S | 1461 | 1652 |
| AD07766 | AM10833-AS | 1102 | 1557 | AM10832-SS-S | 1462 | 1654 |
| AD07768 | AM10837-AS | 1104 | 1559 | AM10836-SS-S | 1463 | 1656 |
| AD07770 | AM10841-AS | 1106 | 1561 | AM10840-SS-S | 1464 | 1658 |
| AD07771 | AM10843-AS | 1107 | 1562 | AM10842-SS-S | 1465 | 1659 |
| AD07772 | AM10845-AS | 1108 | 1563 | AM10844-SS-S | 1466 | 1660 |
| AD07773 | AM10847-AS | 1109 | 1564 | AM10846-SS-S | 1467 | 1661 |
| AD07774 | AM10849-AS | 1110 | 1565 | AM10848-SS-S | 1468 | 1662 |
| AD08094 | AM11275-AS | 1117 | 1569 | AM11274-SS-S | 1469 | 1668 |
| AD08095 | AM11277-AS | 1118 | 1570 | AM11276-SS-S | 1470 | 1669 |
| AD08096 | AM11279-AS | 1119 | 1571 | AM11278-SS-S | 1471 | 1670 |
| AD08097 | AM11281-AS | 1120 | 1572 | AM11280-SS-S | 1472 | 1671 |
| AD08100 | AM11287-AS | 1123 | 1575 | AM11286-SS-S | 1473 | 1674 |
| AD08101 | AM11289-AS | 1124 | 1576 | AM11288-SS-S | 1474 | 1675 |
| AD08103 | AM11293-AS | 1126 | 1578 | AM11292-SS-S | 1475 | 1677 |
| AD08568 | AM11979-AS | 1157 | 1598 | AM11978-SS-S | 1476 | 1695 |
| AD08569 | AM07100-AS | 1716 | 1566 | AM11980-SS-S | 1477 | 1664 |
| AD08571 | AM11984-AS | 1159 | 1600 | AM11983-SS-S | 1478 | 1697 |
| AD08572 | AM07104-AS | 1717 | 1568 | AM11985-SS-S | 1479 | 1667 |
| AD08573 | AM11986-AS | 1160 | 1568 | AM11985-SS-S | 1479 | 1667 |
| AD08666 | AM12163-AS | 1165 | 1535 | AM10767-SS-S | 1448 | 1632 |
| AD08667 | AM12165-AS | 1166 | 1535 | AM12164-SS-S | 1480 | 1632 |
| AD08668 | AM12166-AS | 1167 | 1535 | AM12164-SS-S | 1480 | 1632 |
| AD08669 | AM12167-AS | 1168 | 1535 | AM12164-SS-S | 1480 | 1632 |
| AD08670 | AM12167-AS | 1168 | 1535 | AM12168-SS-S | 1481 | 1699 |
| AD08671 | AM12169-AS | 1169 | 1571 | AM11278-SS-S | 1471 | 1670 |
| AD08672 | AM12171-AS | 1170 | 1571 | AM12170-SS-S | 1482 | 1670 |
| AD08673 | AM12172-AS | 1171 | 1571 | AM12170-SS-S | 1482 | 1670 |

TABLE 9
MUC5AC RNAi Agent Conjugated Duplexes with Corresponding Sense and Antisense Strand ID
Numbers and Sequence ID numbers for the modified and unmodified nucleotide sequences.
(Shown with Targeting Ligand Conjugates)

| | | AS | AS | | SS | SS |
|---|---|---|---|---|---|---|
| | | modified | unmodified | | modified | unmodified |
| Duplex | AS ID | SEQ ID NO: | SEQ ID NO: | SS ID | SEQ ID NO: | SEQ ID NO: |
| AC000313 | AM10743-AS | 1073 | 1531 | CS000387 | 1483 | 1626 |
| AC000431 | AM11264-AS | 1112 | 1566 | CS000521 | 1486 | 1663 |
| AC000432 | AM11264-AS | 1112 | 1566 | CS000523 | 1487 | 1664 |
| AC000433 | AM11266-AS | 1113 | 1566 | CS000521 | 1486 | 1663 |
| AC000434 | AM11268-AS | 1114 | 1567 | CS000525 | 1488 | 1665 |
| AC000435 | AM11268-AS | 1114 | 1567 | CS000527 | 1489 | 1666 |
| AC000436 | AM11271-AS | 1115 | 1568 | CS000528 | 1490 | 1667 |
| AC000437 | AM11272-AS | 1116 | 1568 | CS000528 | 1490 | 1667 |
| AC000480 | AM11401-AS | 1127 | 1525 | CS000578 | 1491 | 1617 |
| AC000482 | AM10595-AS | 1065 | 1525 | CS000578 | 1491 | 1617 |
| AC000483 | AM11495-AS | 1142 | 1590 | CS000578 | 1491 | 1617 |
| AC000484 | AM11496-AS | 1143 | 1525 | CS000578 | 1491 | 1617 |
| AC000485 | AM11403-AS | 1128 | 1579 | CS000583 | 1492 | 1678 |
| AC000486 | AM11404-AS | 1129 | 1579 | CS000583 | 1492 | 1678 |
| AC000487 | AM11405-AS | 1130 | 1579 | CS000583 | 1492 | 1678 |
| AC000502 | AM11462-AS | 1131 | 1580 | CS000517 | 1484 | 1718 |
| AC000504 | AM11464-AS | 1132 | 1581 | CS000608 | 1493 | 1679 |
| AC000505 | AM11465-AS | 1133 | 1581 | CS000608 | 1493 | 1679 |
| AC000506 | AM11467-AS | 1134 | 1582 | CS000612 | 1494 | 1680 |
| AC000507 | AM11469-AS | 1135 | 1583 | CS000614 | 1495 | 1681 |
| AC000508 | AM11471-AS | 1136 | 1584 | CS000616 | 1496 | 1682 |
| AC000509 | AM11473-AS | 1137 | 1585 | CS000618 | 1497 | 1683 |
| AC000510 | AM11475-AS | 1138 | 1586 | CS000620 | 1498 | 1684 |
| AC000511 | AM11477-AS | 1139 | 1587 | CS000622 | 1499 | 1685 |
| AC000512 | AM11479-AS | 1140 | 1588 | CS000624 | 1500 | 1686 |
| AC000513 | AM11481-AS | 1141 | 1589 | CS000626 | 1501 | 1687 |
| AC000805 | AM10739-AS | 1071 | 1530 | CS001001 | 1503 | 1623 |
| AC000806 | AM10741-AS | 1072 | 1530 | CS001003 | 1504 | 1624 |
| AC000807 | AM10743-AS | 1073 | 1531 | CS001005 | 1505 | 1625 |
| AC000808 | AM10744-AS | 1074 | 1531 | CS001005 | 1505 | 1625 |
| AC000809 | AM10747-AS | 1075 | 1532 | CS001007 | 1506 | 1627 |
| AC000810 | AM10747-AS | 1075 | 1532 | CS001009 | 1507 | 1628 |
| AC000811 | AM10747-AS | 1075 | 1532 | CS001010 | 1508 | 1629 |
| AC001128 | AM12178-AS | 1176 | 1568 | CS000528 | 1490 | 1667 |
| AC001129 | AM12178-AS | 1176 | 1568 | CS001401 | 1512 | 1700 |
| AC001130 | AM12180-AS | 1177 | 1568 | CS000528 | 1490 | 1667 |
| AC001131 | AM12181-AS | 1178 | 1568 | CS000528 | 1490 | 1667 |
| AC000832 | AM11742-AS | 1148 | 1566 | CS000523 | 1487 | 1664 |
| AC000833 | AM11742-AS | 1148 | 1566 | CS000521 | 1486 | 1663 |
| AC000834 | AM11742-AS | 1148 | 1566 | CS001040 | 1510 | 1664 |
| AC000835 | AM11272-AS | 1116 | 1568 | CS001041 | 1511 | 1667 |
| AC000836 | AM11745-AS | 1149 | 1568 | CS001041 | 1511 | 1667 |
| AC001305 | AM12165-AS | 1166 | 1535 | CS001644 | 1513 | 1632 |
| AC001306 | AM12612-AS | 1191 | 1535 | CS001644 | 1513 | 1632 |
| AC001708 | AM11401-AS | 1127 | 1525 | CS002194 | 1514 | 1617 |
| AC001709 | AM11401-AS | 1127 | 1525 | CS002195 | 1515 | 1711 |
| AC001710 | AM11401-AS | 1127 | 1525 | CS002196 | 1516 | 1712 |

TABLE 10A
Conjugate Duplex ID Numbers Referencing
Position Targeted On MUC5AC (MUC5AC) Gene

| | | | Targeted MUC5AC |
|---|---|---|---|
| | | | Gene Position |
| Duplex | AS ID | SS ID | (Of SEQ ID NO: 1) |
| AC000313 | AM10743-AS | CS000387 | 1921 |
| AC000431 | AM11264-AS | CS000521 | 5029 |
| AC000432 | AM11264-AS | CS000523 | 5029 |
| AC000433 | AM11266-AS | CS000521 | 5029 |
| AC000434 | AM11268-AS | CS000525 | 9729 |
| AC000435 | AM11268-AS | CS000527 | 9729 |
| AC000436 | AM11271-AS | CS000528 | 15052 |
| AC000437 | AM11272-AS | CS000528 | 15052 |
| AC000480 | AM11401-AS | CS000578 | 3535 |
| AC000482 | AM10595-AS | CS000578 | 3535 |
| AC000483 | AM11495-AS | CS000578 | 3535 |
| AC000484 | AM11496-AS | CS000578 | 3535 |
| AC000485 | AM11403-AS | CS000583 | 3535 |
| AC000486 | AM11404-AS | CS000583 | 3535 |
| AC000487 | AM11405-AS | CS000583 | 3535 |
| AC000502 | AM11462-AS | CS000517 | N/A (murine-specific) |
| AC000504 | AM11464-AS | CS000608 | N/A (murine-specific) |
| AC000505 | AM11465-AS | CS000608 | N/A (murine-specific) |
| AC000506 | AM11467-AS | CS000612 | N/A (murine-specific) |
| AC000507 | AM11469-AS | CS000614 | N/A (murine-specific) |
| AC000508 | AM11471-AS | CS000616 | N/A (murine-specific) |
| AC000509 | AM11473-AS | CS000618 | N/A (murine-specific) |
| AC000510 | AM11475-AS | CS000620 | N/A (murine-specific) |
| AC000511 | AM11477-AS | CS000622 | N/A (murine-specific) |
| AC000512 | AM11479-AS | CS000624 | N/A (murine-specific) |
| AC000513 | AM11481-AS | CS000626 | N/A (murine-specific) |
| AC000805 | AM10739-AS | CS001001 | 304 |
| AC000806 | AM10741-AS | CS001003 | 304 |
| AC000807 | AM10743-AS | CS001005 | 1921 |
| AC000808 | AM10744-AS | CS001005 | 1921 |
| AC000809 | AM10747-AS | CS001007 | 1832 |
| AC000810 | AM10747-AS | CS001009 | 1832 |
| AC000811 | AM10747-AS | CS001010 | 1832 |
| AC001128 | AM12178-AS | CS000528 | 15052 |
| AC001129 | AM12178-AS | CS001401 | 15052 |
| AC001130 | AM12180-AS | CS000528 | 15052 |
| AC001131 | AM12181-AS | CS000528 | 15052 |
| AC000832 | AM11742-AS | CS000523 | 5029 |
| AC000833 | AM11742-AS | CS000521 | 5029 |
| AC000834 | AM11742-AS | CS001040 | 5029 |
| AC000835 | AM11272-AS | CS001041 | 15052 |
| AC000836 | AM11745-AS | CS001041 | 15052 |
| AC001305 | AM12165-AS | CS001644 | 4993 |
| AC001306 | AM12612-AS | CS001644 | 4993 |
| AC001708 | AM11401-AS | CS002194 | 3535 |
| AC001709 | AM11401-AS | CS002195 | 3535 |
| AC001710 | AM11401-AS | CS002196 | 3535 |

TABLE 10B
Conjugate ID Numbers and Corresponding AD Duplex Numbers,
Referencing Position Targeted On MUC5AC (MUC5AC) Gene

| | Corresponding | Targeted MUC5AC |
|---|---|---|
| AC Duplex | AD Duplex | Gene Position |
| Number | Number | (Of SEQ ID NO: 1) |
| AC000313 | AD07720 | 1921 |
| AC000431 | AD08083 | 5029 |
| AC000432 | AD08084 | 5029 |
| AC000433 | AD08085 | 5029 |
| AC000434 | AD08086 | 9729 |
| AC000435 | AD08087 | 9729 |
| AC000436 | AD08088 | 15052 |
| AC000437 | AD08089 | 15052 |
| AC000480 | AD08174 | 3535 |
| AC000482 | AD08173 | 3535 |
| AC000483 | AD08243 | 3535 |
| AC000484 | AD08244 | 3535 |
| AC000485 | AD08175 | 3535 |
| AC000486 | AD08176 | 3535 |
| AC000487 | AD08177 | 3535 |
| AC000502 | AD08222 | N/A (murine-specific) |
| AC000503 | AD08223 | N/A (murine-specific) |
| AC000504 | AD08224 | N/A (murine-specific) |
| AC000505 | AD08225 | N/A (murine-specific) |
| AC000506 | AD08226 | N/A (murine-specific) |
| AC000507 | AD08227 | N/A (murine-specific) |
| AC000508 | AD08228 | N/A (murine-specific) |
| AC000509 | AD08229 | N/A (murine-specific) |
| AC000510 | AD08230 | N/A (murine-specific) |
| AC000511 | AD08231 | N/A (murine-specific) |
| AC000512 | AD08232 | N/A (murine-specific) |
| AC000513 | AD08233 | N/A (murine-specific) |
| AC000805 | AD07716 | 304 |
| AC000806 | AD07717 | 304 |
| AC000807 | AD07718 | 1921 |
| AC000808 | AD07719 | 1921 |
| AC000809 | AD07721 | 1832 |
| AC000810 | AD07722 | 1832 |
| AC000811 | AD07723 | 1832 |
| AC001128 | AD08678 | 15052 |
| AC001129 | AD08679 | 15052 |
| AC001130 | AD08680 | 15052 |
| AC001131 | AD08681 | 15052 |
| AC000832 | AD08420 | 5029 |
| AC000833 | AD08421 | 5029 |
| AC000834 | AD08422 | 5029 |
| AC000835 | AD08423 | 15052 |
| AC000836 | AD08424 | 15052 |
| AC001305 | AD09240 | 4993 |
| AC001306 | AD09241 | 4993 |
| AC001708 | AD09863 | 3535 |
| AC001709 | AD09864 | 3535 |
| AC001710 | AD09865 | 3535 |

TABLE 11
Conjugate ID Numbers With Chemically Modified Antisense and Sense Strands (including Linkers and Conjugates)

| | Sense Strand (Fully Modified with Conjugated Targeting | | | |
|---|---|---|---|---|
| AC ID Number | Ligand) (5′→3′) | SEQ ID NO. | Antisense Strand (5′→3′) | SEQ ID NO. |
| AC000313 | Tri-SM6.1-avb6-(TA14)gsa_2NaguaugCfUfCfaguacugiuas(invAb) | 1483 | cPrpusAfscsCfaGfuGfcUfgAfgCfaUfaCfuUfsc | 1073 |
| AC000431 | Tri-SM6.1-avb6-(TA14)csugcuacaAfCfUfaugagauccas(invAb) | 1486 | cPrpusGfsgsAfuCfuCfaUfaGfuUfgUfaGfcAfsg | 1112 |
| AC000432 | Tri-SM6.1-avb6-(TA14)csugcuacaAfCfUfaugaiauccas(invAb) | 1487 | cPrpusGfsgsAfuCfuCfaUfaGfuUfgUfaGfcAfsg | 1112 |
| AC000433 | Tri-SM6.1-avb6-(TA14)csugcuacaAfCfUfaugagauccas(invAb) | 1486 | cPrpusGfsgsAfuCfUuNACfaUfaGfuUfgUfaGfcAfsg | 1113 |
| AC000434 | Tri-SM6.1-avb6-(TA14)cscuggaccAfAfGfugguuugacas(invAb) | 1488 | cPrpusGfsusCfaAfaCfcAfcUfuGfgUfcCfaGfsg | 1114 |
| AC000435 | Tri-SM6.1-avb6-(TA14)cscuggaccAfAfGfugguuuiacas(invAb) | 1489 | cPrpusGfsusCfaAfaCfcAfcUfuGfgUfcCfaGfsg | 1114 |
| AC000436 | Tri-SM6.1-avb6-(TA14)csgagaucaUfCfUfucaacaacaas(invAb) | 1490 | cPrpusUfsgsUfuGfuUfgAfaGfaUfgAfuCfuCfsg | 1115 |
| AC000437 | Tri-SM6.1-avb6-(TA14)csgagaucaUfCfUfucaacaacaas(invAb) | 1490 | cPrpusUfsgsUfuguugaaGfaUfgAfucucsg | 1116 |
| AC000480 | Tri-SM6.1-avb6-(TA14)gscuguucuGfCfGfacuacuacaas(invAb) | 1491 | cPrpusUfsgsUfaGfuAfgUfcGfcAfgAfaCfaGfsc | 1127 |
| AC000482 | Tri-SM6.1-avb6-(TA14)gscuguucuGfCfGfacuacuacaas(invAb) | 1491 | usUfsgsUfaGfuAfgUfcGfcAfgAfaCfaGfsc | 1065 |
| AC000483 | Tri-SM6.1-avb6-(TA14)gscuguucuGfCfGfacuacuacaas(invAb) | 1491 | cPrpusUfsgsUfaGfuAfgUfcicAfgAfaCfaGfsc | 1142 |
| AC000484 | Tri-SM6.1-avb6-(TA14)gscuguucuGfCfGfacuacuacaas(invAb) | 1491 | cPrpusUfsgsUfaGfuAfgUfcgcAfgAfaCfaGfsc | 1143 |
| AC000485 | Tri-SM6.1-avb6-(TA14)gscuguucuGfUfGfacuacuacaas(invAb) | 1492 | usUfsgsUfaGfuAfgUfcAfcAfgAfaCfaGfsc | 1128 |
| AC000486 | Tri-SM6.1-avb6-(TA14)gscuguucuGfUfGfacuacuacaas(invAb) | 1492 | cPrpusUfsgsUfaGfuAfgUfcAfcAfgAfaCfaGfsc | 1129 |
| AC000487 | Tri-SM6.1-avb6-(TA14)gscuguucuGfUfGfacuacuacaas(invAb) | 1492 | cPrpusUfsgsuaguagucAfcAfgAfacagsc | 1130 |
| AC000502 | Tri-SM6.1-avb6-(TA14)ascccauguGfCfUfacaacuaugas(invAb) | 1484 | cPrpusCfsasuaguuguaGfcAfcAfugggsu | 1131 |
| AC000503 | Tri-SM6.1-avb6-(TA14)asccagaucAfUfCfuucaacaacas(invAb) | 1493 | usGfsusUfgUfuGfaAfgAfuGfaUfcUfgGfsu | 1715 |
| AC000504 | Tri-SM6.1-avb6-(TA14)asccagaucAfUfCfuucaacaacas(invAb) | 1493 | cPrpusGfsusUfgUfuGfaAfgAfuGfaUfcUfgGfsu | 1132 |
| AC000505 | Tri-SM6.1-avb6-(TA14)asccagaucAfUfCfuucaacaacas(invAb) | 1493 | cPrpusGfsusuguugaagAfuGfaUfcuggsu | 1133 |
| AC000506 | Tri-SM6.1-avb6-(TA14)gsgcucuguGfGfUfaacuucaacas(invAb) | 1494 | cPrpusGfsusUfgAfaGfuUfaCfcAfcAfgAfgCfsc | 1134 |
| AC000507 | Tri-SM6.1-avb6-(TA14)gsagcguggAfGfAfaugaaaaguas(invAb) | 1495 | cPrpusAfscsUfuUfuCfaUfuCfuCfcAfcGfcUfsc | 1135 |
| AC000508 | Tri-SM6.1-avb6-(TA14)gsggagaauGfAfAfaaguaugcuas(invAb) | 1496 | cPrpusAfsgsCfaUfaCfuUfuUfcAfuUfcUfcCfsc | 1136 |
| AC000509 | Tri-SM6.1-avb6-(TA14)csuucucgaAfCfUfgcauguaugas(invAb) | 1497 | cPrpusCfsasUfaCfaUfgCfaGfuUfcGfaGfaAfsg | 1137 |
| AC000510 | Tri-SM6.1-avb6-(TA14)gscucgaacUfGfCfauguaugacas(invAb) | 1498 | cPrpusGfsusCfaUfaCfaUfgCfaGfuUfcGfaGfsc | 1138 |
| AC000511 | Tri-SM6.1-avb6-(TA14)csucgaacuGfCfAfuguaugacaas(invAb) | 1499 | cPrpusUfsgsUfcAfuAfcAfuGfcAfgUfuCfgAfsg | 1139 |
| AC000512 | Tri-SM6.1-avb6-(TA14)cscacuguuCfUfGfugacuacuaas(invAb) | 1500 | cPrpusUfsasGfuAfgUfcAfcAfgAfaCfaGfuGfsg | 1140 |
| AC000513 | Tri-SM6.1-avb6-(TA14)csacuguucUfGfUfgacuacuacas(invAb) | 1501 | cPrpusGfsusAfgUfaGfuCfaCfaGfaAfcAfgUfsg | 1141 |
| AC000805 | Tri-SM6.1-avb6-(TA14)csagcuuccAfCfUfacaaiaccuus(invAb) | 1503 | cPrpasAfsgsGfuCfuUfgUfaGfuGfgAfaGfcUfsg | 1071 |
| AC000806 | Tri-SM6.1-avb6-(TA14)csagcuuccAfCfUfacaagaccuus(invAb) | 1504 | cPrpasAfsgsGfuCfU_{UNA}UfgUfaGfuGfgAfaGfcUfsg | 1072 |
| AC000807 | Tri-SM6.1-avb6-(TA14)gsa_2NaguaugCfUfCfagcacugiuas(invAb) | 1505 | cPrpusAfscsCfaGfuGfcUfgAfgCfaUfaCfuUfsc | 1073 |
| AC000808 | Tri-SM6.1-avb6-(TA14)gsa_2NaguaugCfUfCfagcacugiuas(invAb) | 1505 | cPrpusAfscsCfaGfU_{UNA}GfcUfgAfgCfaUfaCfuUfsc | 1074 |
| AC000809 | Tri-SM6.1-avb6-(TA14)gsccuucuuCfAfAfcaccuucaaas(invAb) | 1506 | cPrpusUfsusGfaAfgguguUfgAfaGfaAfgGfsc | 1075 |
| AC000810 | Tri-SM6.1-avb6-(TA14)gsccuucuuCfAfAfcaucuucaaas(invAb) | 1507 | cPrpusUfsusGfaAfgguguUfgAfaGfaAfgGfsc | 1075 |
| AC000811 | Tri-SM6.1-avb6-(TA14)gsccuucuuCfAfAfcacuuucaaas(invAb) | 1508 | cPrpusUfsusGfaAfgguguUfgAfaGfaAfgGfsc | 1075 |
| AC000832 | Tri-SM6.1-avb6-(TA14)csugcuacaAfCfUfaugaiauccas(invAb) | 1487 | cPrpusGfsgsaucucauaGfuUfgUfagcasg | 1148 |
| AC000833 | Tri-SM6.1-avb6-(TA14)csugcuacaAfCfUfaugagauccas(invAb) | 1486 | cPrpusGfsgsaucucauaGfuUfgUfagcasg | 1148 |
| AC000834 | Tri-SM6.1-avb6-(TA14)csugcuaCfaAfcUfaugaiauccas(invAb) | 1510 | cPrpusGfsgsaucucauaGfuUfgUfagcasg | 1148 |
| AC000835 | Tri-SM6.1-avb6-(TA14)csgagauCfaUfcUfucaacaacaas(invAb) | 1511 | cPrpusUfsgsUfuguugaaGfaUfgAfucucsg | 1116 |
| AC000836 | Tri-SM6.1-avb6-(TA14)csgagauCfaUfcUfucaacaacaas(invAb) | 1511 | cPrpusUfsgsuuguugaaGfaUfgAfucucsg | 1149 |
| AC001128 | Tri-SM6.1-avb6-(TA14)csgagaucaUfCfUfucaacaacaas(invAb) | 1490 | cPrpusUfsgsUfugUu_{UNA}UgaaGfaUfgAfucucsg | 1176 |
| AC001129 | Tri-SM6.1-avb6-(TA14)csgagaucaUfCfUfuca_2Nacaacaas(invAb) | 1512 | cPrpusUfsgsUfugU_{UNA}UgaaGfaUfgAfucucsg | 1176 |
| AC001130 | Tri-SM6.1-avb6-(TA14)csgagaucaUfCfUfucaacaacaas(invAb) | 1490 | cPrpusUfsgsUfuguU_{UNA}gaaGfaUfgAfucucsg | 1177 |
| AC001131 | Tri-SM6.1-avb6-(TA14)csgagaucaUfCfUfucaacaacaas(invAb) | 1490 | cPrpusUfsgsUfU_{UNA}guugaaGfaUfgAfucucsg | 1178 |
| AC001305 | Tri-SM6.1-avb6-(TA14)gscugauUfuGfcCfugaacaagaas(invAb) | 1513 | usUfscsuuguucagGfcAfaAfucagsc | 1166 |
| AC001306 | Tri-SM6.1-avb6-(TA14)gscugauUfuGfcCfugaacaagaas(invAb) | 1513 | cPrpuUfcuuguucagGfcAfaAfucagsc | 1191 |
| AC001708 | Tri-SM6.1-avb6-(TA14)gscuguucuGfCfGfacuacuacaa(invAb) | 1514 | cPrpusUfsgsUfaGfuAfgUfcGfcAfgAfaCfaGfsc | 1127 |
| AC001709 | Tri-SM6.1-avb6-(TA14)gscugguucuGfCfGfacuacuacaas(invAb) | 1515 | cPrpusUfsgsUfaGfuAfgUfcGfcAfgAfaCfaGfsc | 1127 |
| AC001710 | Tri-SM6.1-avb6-(TA14)gscguucuGfCfGfacuacuacaas(invAb) | 1516 | cPrpusUfsgsUfaGfuAfgUfcGfcAfgAfaCfaGfsc | 1127 |

[0214] In some embodiments, a MUC5AC RNAi agent is prepared or provided as a salt, mixed salt, or a free-acid. In some embodiments, a MUC5AC RNAi agent is prepared or provided as a pharmaceutically acceptable salt. In some embodiments, a MUC5AC RNAi agent is prepared or provided as a pharmaceutically acceptable sodium or potassium salt The RNAi agents described herein, upon delivery to a cell expressing an MUC5AC gene, inhibit or knockdown expression of one or more MUC5AC genes in vivo and/or in vitro.

### Targeting Groups, Linking Groups, Pharmacokinetic/Pharmacodynamic (PK/PD) Modulators, and Delivery Vehicles

[0215] In some embodiments, a MUC5AC RNAi agent contains or is conjugated to one or more non-nucleotide groups including, but not limited to, a targeting group, a linking group, a pharmacokinetic/pharmacodynamic (PK/PD) modulator, a delivery polymer, or a delivery vehicle. The non-nucleotide group can enhance targeting, delivery, or attachment of the RNAi agent. The non-nucleotide group can be covalently linked to the 3′ and/or 5′ end of either the sense strand and/or the antisense strand. In some embodiments, a MUC5AC RNAi agent contains a non-nucleotide group linked to the 3′ and/or 5′ end of the sense strand. In some embodiments, a non-nucleotide group is linked to the 5′ end of a MUC5AC RNAi agent sense strand. A non-nucleotide group can be linked directly or indirectly to the RNAi agent via a linker/linking group. In some embodiments, a non-nucleotide group is linked to the RNAi agent via a labile, cleavable, or reversible bond or linker.

[0216] In some embodiments, a non-nucleotide group enhances the pharmacokinetic or biodistribution properties of an RNAi agent or conjugate to which it is attached to improve cell- or tissue-specific distribution and cell-specific uptake of the conjugate. In some embodiments, a non-nucleotide group enhances endocytosis of the RNAi agent.

[0217] Targeting groups or targeting moieties enhance the pharmacokinetic or biodistribution properties of a conjugate or RNAi agent to which they are attached to improve cell-specific (including, in some cases, organ specific) distribution and cell-specific (or organ specific) uptake of the conjugate or RNAi agent. A targeting group can be monovalent, divalent, trivalent, tetravalent, or have higher valency for the target to which it is directed. Representative targeting groups include, without limitation, compounds with affinity to cell surface molecule, cell receptor ligands, hapten, antibodies, monoclonal antibodies, antibody fragments, and antibody mimics with affinity to cell surface molecules. In some embodiments, a targeting group is linked to an RNAi agent using a linker, such as a PEG linker or one, two, or three abasic and/or ribitol (abasic ribose) residues, which in some instances can serve as linkers.

[0218] A targeting group, with or without a linker, can be attached to the 5′ or 3′ end of any of the sense and/or antisense strands disclosed in Tables 2, 3, 4, 5, 6, 7, and 11. A linker, with or without a targeting group, can be attached to the 5′ or 3′ end of any of the sense and/or antisense strands disclosed in Tables 2, 3, 4, 5, 6, 7, and 11.

[0219] The MUC5AC RNAi agents described herein can be synthesized having a reactive group, such as an amino group (also referred to herein as an amine), at the 5′-terminus and/or the 3′-terminus. The reactive group can be used subsequently to attach a targeting moiety using methods typical in the art.

[0220] For example, in some embodiments, the MUC5AC RNAi agents disclosed herein can be synthesized having an NH₂-C₆ group at the 5′-terminus of the sense strand of the RNAi agent. The terminal amino group subsequently can be reacted to form a conjugate with, for example, a group that includes an αvβ6 integrin targeting ligand. In some embodiments, the MUC5AC RNAi agents disclosed herein are synthesized having one or more alkyne groups at the 5′-terminus of the sense strand of the RNAi agent. The terminal alkyne group(s) can subsequently be reacted to form a conjugate with, for example, a group that includes an αvβ6 integrin targeting ligand.

[0221] In some embodiments, a targeting group comprises an integrin targeting ligand. In some embodiments, an integrin targeting ligand is an αvβ6 integrin targeting ligand. The use of an αvβ6 integrin targeting ligand facilitates cell-specific targeting to cells having αvβ6 on its respective surface, and binding of the integrin targeting ligand can facilitate entry of the therapeutic agent, such as an RNAi agent, to which it is linked, into cells such as epithelial cells, including pulmonary epithelial cells and renal epithelial cells. Integrin targeting ligands can be monomeric or monovalent (e.g., having a single integrin targeting moiety) or multimeric or multivalent (e.g., having multiple integrin targeting moieties). The targeting group can be attached to the 3′ and/or 5′ end of the RNAi oligonucleotide using methods known in the art. The preparation of targeting groups, such as αvβ6 integrin targeting ligands, is described, for example, in International Patent Application Publication No. WO 2018/085415 and in International Patent Application Publication No. WO 2019/089765, the contents of each of which are incorporated herein in its entirety.

[0222] In some embodiments, targeting groups are linked to the MUC5AC RNAi agents without the use of an additional linker. In some embodiments, the targeting group is designed having a linker readily present to facilitate the linkage to a MUC5AC RNAi agent. In some embodiments, when two or more RNAi agents are included in a composition, the two or more RNAi agents can be linked to their respective targeting groups using the same linkers. In some embodiments, when two or more RNAi agents are included in a composition, the two or more RNAi agents are linked to their respective targeting groups using different linkers.

[0223] In some embodiments, a linking group is conjugated to the RNAi agent. The linking group facilitates covalent linkage of the agent to a targeting group, pharmacokinetic modulator, delivery polymer, or delivery vehicle. The linking group can be linked to the 3′ and/or the 5′ end of the RNAi agent sense strand or antisense strand. In some embodiments, the linking group is linked to the RNAi agent sense strand. In some embodiments, the linking group is conjugated to the 5′ or 3′ end of an RNAi agent sense strand. In some embodiments, a linking group is conjugated to the 5′ end of an RNAi agent sense strand. Examples of linking groups, include but are not limited to: C6-SS-C6, 6-SS-6, reactive groups such a primary amines (e.g., NH2-C6) and alkynes, alkyl groups, abasic residues/nucleotides, amino acids, tri-alkyne functionalized groups, ribitol, and/or PEG groups. Examples of certain linking groups are provided in Table 12.

[0224] A linker or linking group is a connection between two atoms that links one chemical group (such as an RNAi agent) or segment of interest to another chemical group (such as a targeting group, pharmacokinetic modulator, or delivery polymer) or segment of interest via one or more covalent bonds. A labile linkage contains a labile bond. A linkage can optionally include a spacer that increases the distance between the two joined atoms. A spacer may further add flexibility and/or length to the linkage. Spacers include, but are not be limited to, alkyl groups, alkenyl groups, alkynyl groups, aryl groups, aralkyl groups, aralkenyl groups, and aralkynyl groups; each of which can contain one or more heteroatoms, heterocycles, amino acids, nucleotides, and saccharides. Spacer groups are well known in the art and the preceding list is not meant to limit the scope of the description. In some embodiments, a MUC5AC RNAi agent is conjugated to a polyethylene glycol (PEG) moiety, or to a hydrophobic group having 12 or more carbon atoms, such as a cholesterol or palmitoyl group.

[0225] In some embodiments, a MUC5AC RNAi agent is linked to one or more pharmacokinetic/pharmacodynamic (PK/PD) modulators. PK/PD modulators can increase circulation time of the conjugated drug and/or increase the activity of the RNAi agent through improved cell receptor binding, improved cellular uptake, and/or other means. Various PK/PD modulators suitable for use with RNAi agents are known in the art. In some embodiments, the PK/PD modulatory can be cholesterol or cholesteryl derivatives, or in some circumstances a PK/PD modulator can be comprised of alkyl groups, alkenyl groups, alkynyl groups, aryl groups, aralkyl groups, aralkenyl groups, or aralkynyl groups, each of which may be linear, branched, cyclic, and/or substituted or unsubstituted. In some embodiments, the location of attachment for these moieties is at the 5′ or 3′ end of the sense strand, at the 2′ position of the ribose ring of any given nucleotide of the sense strand, and/or attached to the phosphate or phosphorothioate backbone at any position of the sense strand.

[0226] Any of the MUC5AC RNAi agent nucleotide sequences listed in Tables 2, 3, 4, 5, 6, 7, and 11, whether modified or unmodified, can contain 3′ and/or 5′ targeting group(s), linking group(s), and/or PK/PD modulator(s). Any of the MUC5AC RNAi agent sequences listed in Tables 3, 4, 5, 6, 7, and 11, or are otherwise described herein, which contain a 3′ or 5′ targeting group, linking group, and/or PK/PD modulator can alternatively contain no 3′ or 5′ targeting group, linking group, or PK/PD modulator, or can contain a different 3′ or 5′ targeting group, linking group, or pharmacokinetic modulator including, but not limited to, those depicted in Table 12. Any of the MUC5AC RNAi agent duplexes listed in Tables 8A, 8B, 8C, 9, 10A, 10B, and 11, whether modified or unmodified, can further comprise a targeting group or linking group, including, but not limited to, those depicted in Table 11, and the targeting group or linking group can be attached to the 3′ or 5′ terminus of either the sense strand or the antisense strand of the MUC5AC RNAi agent duplex.

[0227] Examples of certain modified nucleotides, capping moieties, and linking groups are provided in Table 12.

TABLE 12
Structures Representing Various Modified Nucleotides, Capping Moieties, and
Linking Groups (wherein [symbol] indicates the point of connection)

[chemical structure]

cPrpus

[chemical structure]

cPrpu

[chemical structure]

cPrpas

[chemical structure]

cPrpa

[chemical structure]

a_2N

[chemical structure]

a_2Ns
When positioned internally:

[chemical structure]

(invAb)
When positioned internally:

[chemical structure]

(invAb)s
When positioned at the 3′ terminal end:

[chemical structure]

(invAb)
When positioned at the 3′ terminal end:

[chemical structure]

(C6-SS-C6)
When positioned internally:

[chemical structure]

(C6-SS-C6)
When positioned at the 3′ terminal end:

[chemical structure]

(6-SS-6)
When positioned internally:

[chemical structure]

(6-SS-6)

[chemical structure]

(NH2-C6)

[chemical structure]

(NH2-C6)s

[chemical structure]

-C6-

[chemical structure]

-C6s-

[chemical structure]

-L6-C6-

[chemical structure]

-L6-C6s-

[chemical structure]

-Alk-cyHex-

[chemical structure]

-Alk-cyHexs-

[chemical structure]

(TriAlk14)

[chemical structure]

(TriAlk14)s

[chemical structure]

(TA14)

[chemical structure]

(TA14)s

[chemical structure]

SM6.1-αvβ6

[0228] Alternatively, other linking groups known in the art may be used. In many instances, linking groups can be commercially acquired or alternatively, are incorporated into commercially available nucleotide phosphoramidites. (See, e.g., International Patent Application Publication No. WO 2019/161213, which is incorporated herein by reference in its entirety).

[0229] In some embodiments, a MUC5AC RNAi agent is delivered without being conjugated to a targeting ligand or pharmacokinetic/pharmacodynamic (PK/PD) modulator (referred to as being “naked” or a “naked RNAi agent”).

[0230] In some embodiments, a MUC5AC RNAi agent is conjugated to a targeting group, a linking group, a PK modulator, and/or another non-nucleotide group to facilitate delivery of the MUC5AC RNAi agent to the cell or tissue of choice, for example, to an epithelial cell in vivo. In some embodiments, a MUC5AC RNAi agent is conjugated to a targeting group wherein the targeting group includes an integrin targeting ligand. In some embodiments, the integrin targeting ligand is an αvβ6 integrin targeting ligand. In some embodiments, a targeting group includes one or more αvβ6 integrin targeting ligands.

[0231] In some embodiments, a delivery vehicle may be used to deliver an RNAi agent to a cell or tissue. A delivery vehicle is a compound that improves delivery of the RNAi agent to a cell or tissue. A delivery vehicle can include, or consist of, but is not limited to: a polymer, such as an amphipathic polymer, a membrane active polymer, a peptide, a melittin peptide, a melittin-like peptide (MLP), a lipid, a reversibly modified polymer or peptide, or a reversibly modified membrane active polyamine.

[0232] In some embodiments, the RNAi agents can be combined with lipids, nanoparticles, polymers, liposomes, micelles, DPCs or other delivery systems available in the art for nucleic acid delivery. The RNAi agents can also be chemically conjugated to targeting groups, lipids (including, but not limited to cholesteryl and cholesteryl derivatives), encapsulating in nanoparticles, liposomes, micelles, conjugating to polymers or DPCs (see, for example WO 2000/053722, WO 2008/022309, WO 2011/104169, and WO 2012/083185, WO 2013/032829, WO 2013/158141, each of which is incorporated herein by reference), by iontophoresis, or by incorporation into other delivery vehicles or systems available in the art such as hydrogels, cyclodextrins, biodegradable nanocapsules, bioadhesive microspheres, or proteinaceous vectors. In some embodiments the RNAi agents can be conjugated to antibodies having affinity for pulmonary epithelial cells. In some embodiments, the RNAi agents can be linked to targeting ligands that have affinity for pulmonary epithelial cells or receptors present on pulmonary epithelial cells.

### Pharmaceutical Compositions and Formulations

[0233] The MUC5AC RNAi agents disclosed herein can be prepared as pharmaceutical compositions or formulations (also referred to herein as “medicaments”). In some embodiments, pharmaceutical compositions include at least one MUC5AC RNAi agent. These pharmaceutical compositions are particularly useful in the inhibition of the expression of MUC5AC mRNA in a target cell, a group of cells, a tissue, or an organism. The pharmaceutical compositions can be used to treat a subject having a disease, disorder, or condition that would benefit from reduction in the level of the target mRNA, or inhibition in expression of the target gene. The pharmaceutical compositions can be used to treat a subject at risk of developing a disease or disorder that would benefit from reduction of the level of the target mRNA or an inhibition in expression the target gene. In one embodiment, the method includes administering a MUC5AC RNAi agent linked to a targeting ligand as described herein, to a subject to be treated. In some embodiments, one or more pharmaceutically acceptable excipients (including vehicles, carriers, diluents, and/or delivery polymers) are added to the pharmaceutical compositions that include a MUC5AC RNAi agent, thereby forming a pharmaceutical formulation or medicament suitable for in vivo delivery to a subject, including a human.

[0234] The pharmaceutical compositions that include a MUC5AC RNAi agent and methods disclosed herein decrease the level of the target mRNA in a cell, group of cells, group of cells, tissue, organ, or subject, including by administering to the subject a therapeutically effective amount of a herein described MUC5AC RNAi agent, thereby inhibiting the expression of MUC5AC mRNA in the subject. In some embodiments, the subject has been previously identified or diagnosed as having a disease or disorder that can be mediated at least in part by a reduction in MUC5AC expression. In some embodiments, the subject has been previously diagnosed with having one or more mucoobstructive lung diseases, such as asthma, CF, COPD, NCFB, PCD. In some embodiments the mucoobstructive lung disease is severe asthma.

[0235] In some embodiments the subject has been previously diagnosed with having interstitial lung diseases, cancer (such as lung adenocarcinomas, pancreatic cancer, salivary gland carcinoma, breast cancer, cholangiocarcinoma, ovarian cancer, and other tumors), respiratory infections (such as respiratory syncytial virus, influenza, rhinovirus), otitis media, inflammatory bowel disease, gallstone disease, allergic rhinitis, chronic rhinosinusitis or nasal polyposis.

[0236] Embodiments of the present disclosure include pharmaceutical compositions for delivering a MUC5AC RNAi agent to a pulmonary epithelial cell in vivo. Such pharmaceutical compositions can include, for example, a MUC5AC RNAi agent conjugated to a targeting group that comprises an integrin targeting ligand. In some embodiments, the integrin targeting ligand is comprised of an αvβ6 integrin ligand.

[0237] In some embodiments, the described pharmaceutical compositions including a MUC5AC RNAi agent are used for treating or managing clinical presentations in a subject that would benefit from the inhibition of expression of MUC5AC. In some embodiments, a therapeutically or prophylactically effective amount of one or more of pharmaceutical compositions is administered to a subject in need of such treatment. In some embodiments, administration of any of the disclosed MUC5AC RNAi agents can be used to decrease the number, severity, and/or frequency of symptoms of a disease in a subject.

[0238] In some embodiments, the described MUC5AC RNAi agents are optionally combined with one or more additional (i.e., second, third, etc.) therapeutics. A second therapeutic can be another MUC5AC RNAi agent (e.g., a MUC5AC RNAi agent that targets a different sequence within a MUC5AC gene). In some embodiments, a second therapeutic can be an RNAi agent that targets the MUC5AC gene. An additional therapeutic can also be a small molecule drug, antibody, antibody fragment, and/or aptamer. The MUC5AC RNAi agents, with or without the one or more additional therapeutics, can be combined with one or more excipients to form pharmaceutical compositions.

[0239] The described pharmaceutical compositions that include a MUC5AC RNAi agent can be used to treat at least one symptom in a subject having a disease or disorder that would benefit from reduction or inhibition in expression of MUC5AC mRNA. In some embodiments, the subject is administered a therapeutically effective amount of one or more pharmaceutical compositions that include a MUC5AC RNAi agent thereby treating the symptom. In other embodiments, the subject is administered a prophylactically effective amount of one or more MUC5AC RNAi agents, thereby preventing or inhibiting the at least one symptom.

[0240] In some embodiments, one or more of the described MUC5AC RNAi agents are administered to a mammal in a pharmaceutically acceptable carrier or diluent. In some embodiments, the mammal is a human.

[0241] The route of administration is the path by which a MUC5AC RNAi agent is brought into contact with the body. In general, methods of administering drugs, oligonucleotides, and nucleic acids, for treatment of a mammal are well known in the art and can be applied to administration of the compositions described herein. The MUC5AC RNAi agents disclosed herein can be administered via any suitable route in a preparation appropriately tailored to the particular route. Thus, in some embodiments, the herein described pharmaceutical compositions are administered via inhalation, intranasal administration, intratracheal administration, or oropharyngeal aspiration administration. In some embodiments, the pharmaceutical compositions can be administered by injection, for example, intravenously, intramuscularly, intracutaneously, subcutaneously, intraarticularly, intraocularly, or intraperitoneally, or topically.

[0242] The pharmaceutical compositions including a MUC5AC RNAi agent described herein can be delivered to a cell, group of cells, tissue, or subject using oligonucleotide delivery technologies known in the art. In general, any suitable method recognized in the art for delivering a nucleic acid molecule (in vitro or in vivo) can be adapted for use with the compositions described herein. For example, delivery can be by local administration, (e.g., direct injection, implantation, or topical administering), systemic administration, or subcutaneous, intravenous, intraperitoneal, or parenteral routes, including intracranial (e.g., intraventricular, intraparenchymal and intrathecal), intramuscular, transdermal, airway (aerosol), nasal, oral, rectal, or topical (including buccal and sublingual) administration. In some embodiments, the compositions are administered via inhalation, intranasal administration, oropharyngeal aspiration administration, or intratracheal administration. For example, in some embodiments, it is desired that the MUC5AC RNAi agents described herein inhibit the expression of an MUC5AC gene in the pulmonary epithelium, for which administration via inhalation (e.g., by an inhaler device, such as a metered-dose inhaler, or a nebulizer such as a jet or vibrating mesh nebulizer, or a soft mist inhaler) is particularly suitable and advantageous.

[0243] In some embodiments, the pharmaceutical compositions described herein comprise one or more pharmaceutically acceptable excipients. The pharmaceutical compositions described herein are formulated for administration to a subject.

[0244] As used herein, a pharmaceutical composition or medicament includes a pharmacologically effective amount of at least one of the described therapeutic compounds and one or more pharmaceutically acceptable excipients. Pharmaceutically acceptable excipients (excipients) are substances other than the Active Pharmaceutical Ingredient (API, therapeutic product, e.g., MUC5AC RNAi agent) that are intentionally included in the drug delivery system. Excipients do not exert or are not intended to exert a therapeutic effect at the intended dosage. Excipients can act to a) aid in processing of the drug delivery system during manufacture, b) protect, support or enhance stability, bioavailability or patient acceptability of the API, c) assist in product identification, and/or d) enhance any other attribute of the overall safety, effectiveness, of delivery of the API during storage or use. A pharmaceutically acceptable excipient may or may not be an inert substance.

[0245] Excipients include, but are not limited to: absorption enhancers, anti-adherents, anti-foaming agents, anti-oxidants, binders, buffering agents, carriers, coating agents, colors, delivery enhancers, delivery polymers, detergents, dextran, dextrose, diluents, disintegrants, emulsifiers, extenders, fillers, flavors, glidants, humectants, lubricants, oils, polymers, preservatives, saline, salts, solvents, sugars, surfactants, suspending agents, sustained release matrices, sweeteners, thickening agents, tonicity agents, vehicles, water-repelling agents, and wetting agents.

[0246] Pharmaceutical compositions suitable for injectable use include sterile aqueous solutions (where water-soluble) or dispersions and sterile powders for the extemporaneous preparation of sterile injectable solutions or dispersion. For intravenous administration, suitable carriers include physiological saline, bacteriostatic water, Cremophor® ELTM (BASF, Parsippany, NJ) or phosphate buffered saline (PBS). It should be stable under the conditions of manufacture and storage and should be preserved against the contaminating action of microorganisms such as bacteria and fungi. The carrier can be a solvent or dispersion medium containing, for example, water, ethanol, polyol (for example, glycerol, propylene glycol, and liquid polyethylene glycol), and suitable mixtures thereof. The proper fluidity can be maintained, for example, by the use of a coating such as lecithin, by the maintenance of the required particle size in the case of dispersion and by the use of surfactants. In many cases, it will be preferable to include isotonic agents, for example, sugars, polyalcohols such as mannitol, sorbitol, and sodium chloride in the composition. Prolonged absorption of the injectable compositions can be brought about by including in the composition an agent which delays absorption, for example, aluminum monostearate and gelatin.

[0247] Sterile injectable solutions can be prepared by incorporating the active compound in the required amount in an appropriate solvent with one or a combination of ingredients enumerated above, as required, followed by filter sterilization. Generally, dispersions are prepared by incorporating the active compound into a sterile vehicle which contains a basic dispersion medium and the required other ingredients from those enumerated above. In the case of sterile powders for the preparation of sterile injectable solutions, methods of preparation include vacuum drying and freeze-drying which yields a powder of the active ingredient plus any additional desired ingredient from a previously sterile-filtered solution thereof.

[0248] Formulations suitable for intra-articular administration can be in the form of a sterile aqueous preparation of the drug that can be in microcrystalline form, for example, in the form of an aqueous microcrystalline suspension. Liposomal formulations or biodegradable polymer systems can also be used to present the drug for both intra-articular and ophthalmic administration.

[0249] Formulations suitable for inhalation administration can be prepared by incorporating the active compound in the desired amount in an appropriate solvent, followed by sterile filtration. In general, formulations for inhalation administration are sterile solutions at physiological pH and have low viscosity (<5 cP). Salts may be added to the formulation to balance tonicity. In some cases, surfactants or co-solvents can be added to increase active compound solubility and improve aerosol characteristics. In some cases, excipients can be added to control viscosity in order to ensure size and distribution of nebulized droplets.

[0250] In some embodiments, pharmaceutical formulations that include the MUC5AC RNAi agents disclosed herein suitable for inhalation administration can be prepared in water for injection (sterile water), isotonic saline (0.9% saline), or an aqueous sodium phosphate buffer (for example, the MUC5AC RNAi agent formulated in 0.5 mM sodium phosphate monobasic, 0.5 mM sodium phosphate dibasic, in water).

[0251] The active compounds can be prepared with carriers that will protect the compound against rapid elimination from the body, such as a controlled release formulation, including implants and microencapsulated delivery systems. Biodegradable, biocompatible polymers can be used, such as ethylene vinyl acetate, polyanhydrides, polyglycolic acid, collagen, polyorthoesters, and polylactic acid. Methods for preparation of such formulations will be apparent to those skilled in the art. Liposomal suspensions can also be used as pharmaceutically acceptable carriers. These can be prepared according to methods known to those skilled in the art, for example, as described in U.S. Pat. No. 4,522,811.

[0252] The MUC5AC RNAi agents can be formulated in compositions in dosage unit form for ease of administration and uniformity of dosage. Dosage unit form refers to physically discrete units suited as unitary dosages for the subject to be treated; each unit containing a predetermined quantity of active compound calculated to produce the desired therapeutic effect in association with the required pharmaceutical carrier. The specification for the dosage unit forms of the disclosure are dictated by and directly dependent on the unique characteristics of the active compound and the therapeutic effect to be achieved, and the limitations inherent in the art of compounding such an active compound for the treatment of individuals.

[0253] A pharmaceutical composition can contain other additional components commonly found in pharmaceutical compositions. Such additional components include, but are not limited to: anti-pruritics, astringents, local anesthetics, or anti-inflammatory agents (e.g., antihistamine, diphenhydramine, etc.). It is also envisioned that cells, tissues, or isolated organs that express or comprise the herein defined RNAi agents may be used as “pharmaceutical compositions.” As used herein, “pharmacologically effective amount,” “therapeutically effective amount,” or simply “effective amount” refers to that amount of an RNAi agent to produce a pharmacological, therapeutic, or preventive result.

[0254] In some embodiments, the methods disclosed herein further comprise the step of administering a second therapeutic or treatment in addition to administering an RNAi agent disclosed herein. In some embodiments, the second therapeutic is another MUC5AC RNAi agent (e.g., a MUC5AC RNAi agent that targets a different sequence within the MUC5AC target). In other embodiments, the second therapeutic can be a small molecule drug, an antibody, an antibody fragment, and/or an aptamer.

[0255] In some embodiments, described herein are compositions that include a combination or cocktail of at least two MUC5AC RNAi agents having different sequences. In some embodiments, the two or more MUC5AC RNAi agents are each separately and independently linked to targeting groups. In some embodiments, the two or more MUC5AC RNAi agents are each linked to targeting groups that include or consist of integrin targeting ligands. In some embodiments, the two or more MUC5AC RNAi agents are each linked to targeting groups that include or consist of αvβ6 integrin targeting ligands.

[0256] Described herein are compositions for delivery of MUC5AC RNAi agents to pulmonary epithelial cells. Furthermore, compositions for delivery of MUC5AC RNAi agents to cells, including renal epithelial cells and/or epithelial cells in the GI or reproductive tract and/or and ocular surface epithelial cells in the eye, in vivo, are generally described herein.

[0257] Generally, an effective amount of a MUC5AC RNAi agent disclosed herein will be in the range of from about 0.0001 to about 20 mg/kg of body weight/pulmonary deposited dose (PDD), e.g., from about 0.001 to about 5 mg/kg of body weight/pulmonary deposited dose. In some embodiments, an effective amount of a MUC5AC RNAi agent will be in the range of from about 0.01 mg/kg to about 3.0 mg/kg of body weight per pulmonary deposited dose. In some embodiments, an effective amount of a MUC5AC RNAi agent will be in the range of from about 0.03 mg/kg to about 2.0 mg/kg of body weight per pulmonary deposited dose. In some embodiments, an effective amount of a MUC5AC RNAi agent will be in the range of from about 0.01 to about 1.0 mg/kg of pulmonary deposited dose per body weight. In some embodiments, an effective amount of a MUC5AC RNAi agent will be in the range of from about 0.25 to about 1.0 mg/kg of pulmonary deposited dose per body weight. In some embodiments, an effective amount of a MUC5AC RNAi agent will be in the range of from about 0.25 mg/kg of pulmonary deposited dose per body weight. In some embodiments, an effective amount of a MUC5AC RNAi agent will be in the range of from about 0.50 mg/kg of pulmonary deposited dose per body weight. In some embodiments, an effective amount of a MUC5AC RNAi agent will be in the range of from about 1.0 mg/kg of pulmonary deposited dose per body weight. Calculating the pulmonary deposited dose (PDD) is done in accordance with methods known in the art. (See Wolff R. K., Dorato M. A., Toxicologic Testing of Inhaled Pharmaceutical Aerosols, Crit Rev Toxicol., 1993; 23(4):343-369; Tepper et al., International J. Toxicology, 2016, vol. 35(4):376-392). A comparable and alternatively acceptable method of calculating dose that is well known in the art, especially for human subjects, is determining the respirable delivered dose (RDD). RDD refers to the amount of drug contained in droplets of a size suitable for penetration into the lungs. Generally, an effective amount of a MUC5AC RNAi agent disclosed herein will be in the range of from about 0.001 to about 5 mg respirable delivered dose (RDD)/kg body weight.

[0258] For clinical applications, the amount of MUC5AC RNAi agent needed to be loaded into the delivery device of choice (e.g., a nebulizer) that is required to produce such RDDs in human subjects will depend upon the delivery device used (see, for example, Hatley RHM, Byrne SM, Variability in delivered dose and respirable delivered dose from nebulizers: are current regulatory testing guidelines sufficient to produce meaningful information?, Med Devices, 2017, 10:17-28). Some lower efficient nebulizers, for example, RDD is approximately 15%-25% of the dose loaded into the nebulizer. For other more efficient devices, for example, RDD is approximately 50%, approximately 60%, or even higher than 60% of the dose loaded into the nebulizer. In some embodiments, a fixed dose of, for example, approximately 5 mg, approximately 10 gm, approximately 20 mg, approximately 25 mg, approximately 50 mg, approximately 75 mg, approximately 100 mg, approximately 150 mg, approximately 200 mg, approximately 250 mg, or approximately 300 mg of MUC5AC RNAi agent may be loaded into the respective device of choice, which will produce an RDD from about 0.001 to about 5 mg/kg of body weight per dose. The amount desired or required to be administered will also likely depend on such variables as the overall health status of the patient, the relative biological efficacy of the compound delivered, the formulation of the drug, the presence and types of excipient in the formulation, and the route of administration. Also, it is to be understood that the initial dosage administered can be increased beyond the above upper level to rapidly achieve the desired blood-level or tissue-level, or the initial dosage can be smaller than the optimum. In various embodiments, a dose may be administered daily, weekly, bi-weekly, tri-weekly, once monthly, once quarterly (i.e. once every three months), or once every six months. In various embodiments, a dose may be administered at other intervals contained within the range provided above.

[0259] For treatment of disease or for formation of a medicament or composition for treatment of a disease, the pharmaceutical compositions described herein including a MUC5AC RNAi agent can be combined with an excipient or with a second therapeutic agent or treatment including, but not limited to: a second or other RNAi agent, a small molecule drug, an antibody, an antibody fragment, peptide, and/or an aptamer.

[0260] The described MUC5AC RNAi agents, when added to pharmaceutically acceptable excipients or adjuvants, can be packaged into kits, containers, packs, or dispensers. The pharmaceutical compositions described herein can be packaged in dry powder or aerosol inhalers, other metered-dose inhalers, nebulizers, pre-filled syringes, or vials.

### Methods of Treatment and Inhibition of MUC5AC Expression

[0261] The MUC5AC RNAi agents disclosed herein can be used to treat a subject (e.g., a human or other mammal) having a disease or disorder that would benefit from administration of the RNAi agent. In some embodiments, the RNAi agents disclosed herein can be used to treat a subject (e.g., a human) that would benefit from a reduction and/or inhibition in expression of MUC5AC mRNA and/or a reduction in MUC5AC receptor levels.

[0262] In some embodiments, the RNAi agents disclosed herein can be used to treat a subject (e.g., a human) having a disease or disorder for which the subject would benefit from reduction in MUC5AC receptors, including but not limited to, mucoobstructive lung diseases (such as asthma, CF, COPD, NCFB, PCD), allergic bronchopulmonary aspergillosis, interstitial lung diseases, cancer (such as lung adenocarcinomas, pancreatic cancer, salivary gland carcinoma, breast cancer, cholangiocarcinoma, ovarian cancer, and other tumors), respiratory infections (such as respiratory syncytial virus, influenza, rhinovirus), otitis media, inflammatory bowel disease, gallstone disease, allergic rhinitis, chronic rhinosinusitis and nasal polyposis. In some embodiments the pulmonary diseases is severe asthma. Treatment of a subject can include therapeutic and/or prophylactic treatment. The subject is administered a therapeutically effective amount of any one or more MUC5AC RNAi agents described herein. The subject can be a human, patient, or human patient. The subject may be an adult, adolescent, child, or infant. Administration of a pharmaceutical composition described herein can be to a human being or animal.

[0263] Increased membrane MUC5AC activity is known to promote mucoobstruction tissues. In some embodiments, the described MUC5AC RNAi agents are used to treat at least one symptom mediated at least in part by a reduction in MUC5AC levels, in a subject. The subject is administered a therapeutically effective amount of any one or more of the described MUC5AC RNAi agents. In some embodiments, the subject is administered a prophylactically effective amount of any one or more of the described RNAi agents, thereby treating the subject by preventing or inhibiting the at least one symptom.

[0264] In certain embodiments, the present disclosure provides methods for treatment of diseases, disorders, conditions, or pathological states mediated at least in part by MUC5AC gene expression, in a patient in need thereof, wherein the methods include administering to the patient any of the MUC5AC RNAi agents described herein.

[0265] In some embodiments, the MUC5AC RNAi agents are used to treat or manage a clinical presentation or pathological state in a subject, wherein the clinical presentation or pathological state is mediated at least in part by a reduction in MUC5AC expression. The subject is administered a therapeutically effective amount of one or more of the MUC5AC RNAi agents or MUC5AC RNAi agent-containing compositions described herein. In some embodiments, the method comprises administering a composition comprising a MUC5AC RNAi agent described herein to a subject to be treated.

[0266] In a further aspect, the disclosure features methods of treatment (including prophylactic or preventative treatment) of diseases or symptoms that may be addressed by a reduction in MUC5AC receptor levels, the methods comprising administering to a subject in need thereof a MUC5AC RNAi agent that includes an antisense strand comprising the sequence of any of the sequences in Table 2, Table 3, or Table 11. Also described herein are compositions for use in such methods.

[0267] The described MUC5AC RNAi agents and/or compositions that include MUC5AC RNAi agents can be used in methods for therapeutic treatment of disease or conditions caused by enhanced or elevated MUC5AC protein or MUC5AC gene expression. Such methods include administration of a MUC5AC RNAi agent as described herein to a subject, e.g., a human or animal subject.

[0268] In another aspect, the disclosure provides methods for the treatment (including prophylactic treatment) of a pathological state (such as a condition or disease) mediated at least in part by MUC5AC expression, wherein the methods include administering to a subject a therapeutically effective amount of an RNAi agent that includes an antisense strand comprising the sequence of any of the sequences in Table 2, Table 3, or Table 11.

[0269] In some embodiments, methods for inhibiting expression of an MUC5AC gene are disclosed herein, wherein the methods include administering to a cell an RNAi agent that includes an antisense strand comprising the sequence of any of the sequences in Table 2, Table 3, or Table 11.

[0270] In some embodiments, methods for the treatment (including prophylactic treatment) of a pathological state mediated at least in part by MUC5AC expression are disclosed herein, wherein the methods include administering to a subject a therapeutically effective amount of an RNAi agent that includes a sense strand comprising the sequence of any of the sequences in Table 2, Table 4, Table 5, Table 6, Table 7, or Table 11.

[0271] In some embodiments, methods for inhibiting expression of an MUC5AC gene are disclosed herein, wherein the methods comprise administering to a cell an RNAi agent that includes a sense strand comprising the sequence of any of the sequences in Table 2, Table 4, Table 5, Table 6, Table 7, or Table 11.

[0272] In some embodiments, methods for the treatment (including prophylactic treatment) of a pathological state mediated at least in part by MUC5AC expression are disclosed herein, wherein the methods include administering to a subject a therapeutically effective amount of an RNAi agent that includes a sense strand comprising the sequence of any of the sequences in Table 4, Table 5, Table 6, Table 7, or Table 11, and an antisense strand comprising the sequence of any of the sequences in Table 3 or Table 11.

[0273] In some embodiments, methods for inhibiting expression of a MUC5AC gene are disclosed herein, wherein the methods include administering to a cell an RNAi agent that includes a sense strand comprising the sequence of any of the sequences in Table 4, Table 5, Table 6, Table 7, or Table 11. and an antisense strand comprising the sequence of any of the sequences in Table 3 or Table 11.

[0274] In some embodiments, methods of inhibiting expression of a MUC5AC gene are disclosed herein, wherein the methods include administering to a subject a MUC5AC RNAi agent that includes a sense strand consisting of the nucleobase sequence of any of the sequences in Table 4, Table 5, Table 6, Table 7, or Table 11, and the antisense strand consisting of the nucleobase sequence of any of the sequences in Table 3 or Table 11. In other embodiments, disclosed herein are methods of inhibiting expression of a MUC5AC gene, wherein the methods include administering to a subject a MUC5AC RNAi agent that includes a sense strand consisting of the modified sequence of any of the modified sequences in Table 4, Table 5, Table 6, Table 7, or Table 11, and the antisense strand consisting of the modified sequence of any of the modified sequences in Table 3 or Table 11.

[0275] In some embodiments, methods for inhibiting expression of an MUC5AC gene in a cell are disclosed herein, wherein the methods include administering one or more MUC5AC RNAi agents comprising a duplex structure of one of the duplexes set forth in Tables 8A, 8B, 8C, 9, 10A, 10B, and 11.

[0276] In some embodiments, the quantity or amount of MUC5AC protein and/or MUC5AC mRNA in certain pulmonary epithelial cells of subject to whom a described MUC5AC RNAi agent is administered is reduced by at least about 5%, 10%, 15%, 20%, 25%, 30%, 35%, 40%, 45%, 50%, 55%, 60%, 65%, 70%, 75%, 80%, 85%, 90%, 95%, 96%, 97%, 98%, 99%, or greater than 99%, relative to the subject prior to being administered the MUC5AC RNAi agent or to a subject not receiving the MUC5AC RNAi agent. In some embodiments, MUC5AC protein levels in certain epithelial cells of a subject to whom a described MUC5AC RNAi agent is administered is reduced by at least about 5%, 10%, 15%, 20%, 25%, 30%, 35%, 40%, 45%, 50%, 55%, 60%, 65%, 70%, 75%, 80%, 85%, 90%, 95%, 96%, 97%, 98%, 99%, or greater than 99%, relative to the subject prior to being administered the MUC5AC RNAi agent or to a subject not receiving the MUC5AC RNAi agent. The gene expression level, protein level, and/or mRNA level in the subject may be reduced in a cell, group of cells, and/or tissue of the subject. In some embodiments, the MUC5AC mRNA levels in certain epithelial cells subject to whom a described MUC5AC RNAi agent has been administered is reduced by at least about 30%, 35%, 40%, 45%, 50%, 55%, 60%, 65%, 70%, 75%, 80%, 85%, 90%, 95%, or 98% relative to the subject prior to being administered the MUC5AC RNAi agent or to a subject not receiving the MUC5AC RNAi agent.

[0277] A reduction in MUC5AC mRNA and MUC5AC protein levels can be assessed by any methods known in the art. Reduction or decrease in MUC5AC mRNA and/or MUC5AC protein levels are collectively referred to herein as a decrease in, reduction of, or inhibition of MUC5AC gene expression. The Examples set forth herein illustrate known methods for assessing inhibition of MUC5AC.

### Cells, Tissues, Organs, and Non-Human Organisms

[0278] Cells, tissues, organs, and non-human organisms that include at least one of the MUC5AC RNAi agents described herein are contemplated. The cell, tissue, organ, or non-human organism is made by delivering the RNAi agent to the cell, tissue, organ, or non-human organism.

### Additional Illustrative Embodiments

[0279] Provided here are certain additional illustrative embodiments of the disclosed technology. These embodiments are illustrative only and do not limit the scope of the present disclosure or of the claims attached hereto.

[0280] Embodiment 1. An RNAi agent for inhibiting expression of a Mucin 5AC gene, comprising: an antisense strand comprising at least 17 contiguous nucleotides differing by 0 or 1 nucleotides from any one of the sequences provided in Table 2 or Table 3; and a sense strand comprising a nucleotide sequence that is at least partially complementary to the antisense strand

[0281] Embodiment 2. The RNAi agent of Embodiment 1, wherein the antisense strand comprises nucleotides 2-18 of any one of the sequences provided in Table 2 or Table 3.

[0282] Embodiment 3. The RNAi agent of Embodiment 1 or Embodiment 2, wherein the sense strand comprises a nucleotide sequence of at least 17 contiguous nucleotides differing by 0 or 1 nucleotides from any one of the sequences provided in Table 2 or Table 4, and wherein the sense strand has a region of at least 85% complementarity over the 17 contiguous nucleotides to the antisense strand.

[0283] Embodiment 4. The RNAi agent of any one of Embodiments 1-3, wherein at least one nucleotide of the RNAi agent is a modified nucleotide or includes a modified internucleoside linkage.

[0284] Embodiment 5. The RNAi agent of any one of Embodiments 1-4, wherein all or substantially all of the nucleotides are modified nucleotides.

[0285] Embodiment 6. The RNAi agent of any one of Embodiments 4-5, wherein the modified nucleotide is selected from the group consisting of: 2′-O-methyl nucleotide, 2′-fluoro nucleotide, 2′-deoxy nucleotide, 2′,3′-seco nucleotide mimic, locked nucleotide, 2′-F-arabino nucleotide, 2′-methoxyethyl nucleotide, abasic nucleotide, ribitol, inverted nucleotide, inverted 2′-O-methyl nucleotide, inverted 2′-deoxy nucleotide, 2′-amino-modified nucleotide, 2′-alkyl-modified nucleotide, morpholino nucleotide, vinyl phosphonate-containing nucleotide, cyclopropyl phosphonate-containing nucleotide, and 3′-O-methyl nucleotide.

[0286] Embodiment 7. The RNAi agent of Embodiment 5, wherein all or substantially all of the nucleotides are modified with 2′-O-methyl nucleotides, 2′-fluoro nucleotides, or combinations thereof.

[0287] Embodiment 8. The RNAi agent of any one of Embodiments 1-7, wherein the antisense strand comprises the nucleotide sequence of any one of the modified antisense strand sequences provided in Table 3 or Table 11.

[0288] Embodiment 9. The RNAi agent of any one of Embodiments 1-8, wherein the sense strand comprises the nucleotide sequence of any one of the modified sense strand sequences provided in Table 4 or Table 11.

[0289] Embodiment 10. The RNAi agent of Embodiment 1, wherein the antisense strand comprises the nucleotide sequence of any one of the modified antisense strand sequences provided in Table 3 or Table 11, and the sense strand comprises the nucleotide sequence of any one of the modified sense strand sequences provided in Table 4 or Table 11.

[0290] Embodiment 11. The RNAi agent of any one of Embodiments 1-10, wherein the sense strand is between 18 and 30 nucleotides in length, and the antisense strand is between 18 and 30 nucleotides in length.

[0291] Embodiment 12. The RNAi agent of Embodiment 11, wherein the sense strand and the antisense strand are each between 18 and 27 nucleotides in length.

[0292] Embodiment 13. The RNAi agent of Embodiment 12, wherein the sense strand and the antisense strand are each between 18 and 24 nucleotides in length.

[0293] Embodiment 14. The RNAi agent of Embodiment 13, wherein the sense strand and the antisense strand are each 21 nucleotides in length.

[0294] Embodiment 15. The RNAi agent of Embodiment 14, wherein the RNAi agent has two blunt ends.

[0295] Embodiment 16. The RNAi agent of any one of Embodiments 1-15, wherein the sense strand comprises one or two terminal caps.

[0296] Embodiment 17. The RNAi agent of any one of Embodiments 1-16, wherein the sense strand comprises one or two inverted abasic residues.

[0297] Embodiment 18. The RNAi agent of Embodiment 1, wherein the RNAi agent is comprised of a sense strand and an antisense strand that form a duplex having the structure of any one of the duplexes in Table 8A, Table 8B, Table 8C, Table 9, Table 10A, or Table 10B.

[0298] Embodiment 19. The RNAi agent of Embodiment 18, wherein all or substantially all of the nucleotides are modified nucleotides.

[0299] Embodiment 20. The RNAi agent of Embodiment 1, wherein the antisense strand consists of, consists essentially of, or comprises a nucleotide sequence that differs by 0 or 1 nucleotides from one of the following nucleotide sequences (5′→3′):

(SEQ ID NO: 79)
UUGUAGUAGUCGCAGAACA;
or
(SEQ ID NO: 83)
UUCUUGUUCAGGCAAAUCA.

[0300] Embodiment 21. The RNAi agent of Embodiment 1, wherein the antisense strand consists of, consists essentially of, or comprises a nucleotide sequence that differs by 0 or 1 nucleotides from one of the following nucleotide sequences (5′→3′):

(SEQ ID NO: 1525)
UUGUAGUAGUCGCAGAACAGC;
or
(SEQ ID NO: 1535)
UUCUUGUUCAGGCAAAUCAGC.

[0301] Embodiment 22. The RNAi agent of Embodiment 1, wherein the sense strand consists of, consists essentially of, or comprises a nucleotide sequence that differs by 0 or 1 nucleotides from one of the following nucleotide sequences (5′→3′):

(SEQ ID NO: 568)
UGUUCUGCGACUACUACAA;
or
(SEQ ID NO: 572)
UGAUUUGCCUGAACAAGAA.

[0302] Embodiment 23. The RNAi agent of Embodiment 20, 21, or 22, wherein all or substantially all of the nucleotides are modified nucleotides

[0303] Embodiment 24. The RNAi agent of Embodiment 1, wherein the antisense strand comprises, consists of, or consists essentially of a modified nucleotide sequence that differs by 0 or 1 nucleotides from one of the following nucleotide sequences (5′→3′):

(SEQ ID NO: 1127)
cPrpusUfsgsUfaGfuAfgUfcGfcAfgAfaCfaGfsc;
(SEQ ID NO: 1065)
usUfsgsUfaGfuAfgUfcGfcAfgAfaCfaGfsc;
(SEQ ID NO: 1166)
usUfscsuuguucagGfcAfaAfucagsc;
or
(SEQ ID NO: 1191)
cPrpuUfcuuguucagGfcAfaAfucagsc;

wherein a, c, g, and u represent 2′-O-methyl adenosine, 2′-O-methyl cytidine, 2′-O-methyl guanosine, and 2′-O-methyl uridine, respectively; Af, Cf, Gf, and Uf represent 2′-fluoro adenosine, 2′-fluoro cytidine, 2′-fluoro guanosine, and 2′-fluoro uridine, respectively; cPrpu represents a 5′-cyclopropyl phosphonate-2′-O-methyl uridine; s represents a phosphorothioate linkage; and wherein all or substantially all of the nucleotides on the sense strand are modified nucleotides.

[0304] Embodiment 25. The RNAi agent of Embodiment 1, wherein the sense strand comprises, consists of, or consists essentially of a modified nucleotide sequence that differs by 0 or 1 nucleotides from one of the following nucleotide sequences (5′→3′):

(SEQ ID NO: 1265)
gscuguucuGfCfGfacuacuacaa;
or
(SEQ ID NO: 1315)
gscugauUfuGfcCfugaacaagaa;

wherein a, c, g, and u represent 2′-O-methyl adenosine, 2′-O-methyl cytidine, 2′-O-methyl guanosine, and 2′-O-methyl uridine, respectively; Af, Cf, Gf, and Uf represent 2′-fluoro adenosine, 2′-fluoro cytidine, 2′-fluoro guanosine, and 2′-fluoro uridine, respectively; and s represents a phosphorothioate linkage; and wherein all or substantially all of the nucleotides on the antisense strand are modified nucleotides.

[0305] Embodiment 26. The RNAi agent of any one of Embodiments 20-25, wherein the sense strand further includes inverted abasic residues at the 3′ terminal end of the nucleotide sequence, at the 5′ end of the nucleotide sequence, or at both.

[0306] Embodiment 27. The RNAi agent of any one of Embodiments 1-26, wherein the RNAi agent is linked to a targeting ligand.

[0307] Embodiment 28. The RNAi agent of Embodiment 27, wherein the targeting ligand has affinity for a cell receptor expressed on an epithelial cell.

[0308] Embodiment 29. The RNAi agent of Embodiment 28, wherein the targeting ligand comprises an integrin targeting ligand.

[0309] Embodiment 30. The RNAi agent of Embodiment 29, wherein the integrin targeting ligand is an αvβ6 integrin targeting ligand.

[0310] Embodiment 31. The RNAi agent of Embodiment 30, wherein the targeting ligand comprises the structure:

[chemical structure]

or a pharmaceutically acceptable salt thereof, or

[chemical structure]

or a pharmaceutically acceptable salt thereof, wherein [symbol] indicates the point of connection to the RNAi agent.

[0311] Embodiment 32. The RNAi agent of any one of Embodiments 27-30, wherein RNAi agent is conjugated to a targeting ligand having the following structure:

[chemical structure]

pharmaceutically acceptable salt thereof, wherein [symbol] indicates the point of connection to the RNAi agent.

[0312] Embodiment 33. The RNAi agent of any one of Embodiments 27-30, wherein the targeting ligand has the following structure:

[chemical structure]

pharmaceutically acceptable salt thereof, wherein [symbol] indicates the point of connection to the RNAi agent.

[0313] Embodiment 34. The RNAi agent of any one of Embodiments 27-33, wherein the targeting ligand is conjugated to the sense strand.

[0314] Embodiment 35. The RNAi agent of Embodiment 34, wherein the targeting ligand is conjugated to the 5′ terminal end of the sense strand.

[0315] Embodiment 36. A composition comprising the RNAi agent of any one of Embodiments 1-35, wherein the composition further comprises a pharmaceutically acceptable excipient.

[0316] Embodiment 37. The composition of Embodiment 36, further comprising a second RNAi agent capable of inhibiting the expression of Mucin 5AC gene expression.

[0317] Embodiment 38. The composition of any one of Embodiments 36-37, further comprising one or more additional therapeutics.

[0318] Embodiment 39. The composition of any one of Embodiments 36-38, wherein the composition is formulated for administration by inhalation.

[0319] Embodiment 40. The composition of Embodiment 39, wherein the composition is delivered by a metered-dose inhaler, jet nebulizer, vibrating mesh nebulizer, or soft mist inhaler.

[0320] Embodiment 41. The composition of any of Embodiments 36-40, wherein the RNAi agent is a sodium salt.

[0321] Embodiment 42. The composition of any of Embodiments 36-41, wherein the pharmaceutically acceptable excipient is water for injection.

[0322] Embodiment 43. The composition of any of Embodiments 36-42, wherein the pharmaceutically acceptable excipient is isotonic saline.

[0323] Embodiment 44. A method for inhibiting expression of a MUC5AC gene in a cell, the method comprising introducing into a cell an effective amount of an RNAi agent of any one of Embodiments 1-35 or the composition of any one of Embodiments 36-43.

[0324] Embodiment 45. The method of Embodiment 44, wherein the cell is within a subject.

[0325] Embodiment 46. The method of Embodiment 45, wherein the subject is a human subject.

[0326] Embodiment 47. The method of any one of claims 44-46, wherein following the administration of the RNAi agent the Mucin 5AC gene expression is inhibited by at least about 30%.

[0327] Embodiment 48. A method of treating one or more symptoms or diseases associated with MUC5AC protein levels, the method comprising administering to a human subject in need thereof a therapeutically effective amount of the composition of any one of Embodiments 36-43.

[0328] Embodiment 49. The method of Embodiment 48, wherein the disease is a mucoobstructive lung disease.

[0329] Embodiment 50. The method of Embodiment 49, wherein the mucoobstructive lung disease is asthma (including severe asthma), cystic fibrosis (CF), bronchiectasis (NCFB), or chronic obstructive pulmonary disease (COPD).

[0330] Embodiment 51. The method of Embodiment 50, wherein the disease is asthma (including severe asthma).

[0331] Embodiment 52. The method of Embodiment 48, wherein the disease is cancer.

[0332] Embodiment 53. The method of Embodiment 52, wherein the cancer is lung adenocarcinoma, pancreatic cancer, salivary gland carcinoma, breast cancer, cholangiocarcinoma, or ovarian cancer.

[0333] Embodiment 54. The method of any one of Embodiments 44-53, wherein the RNAi agent is administered at a pulmonary deposited dose (PDD) of about 0.01 mg/kg to about 5.0 mg/kg of body weight of the subject.

[0334] Embodiment 55. The method of any one of Embodiments 44-53, wherein the RNAi agent is administered at a pulmonary deposited dose (PDD) of about 0.1 mg/kg to about 2.0 mg/kg of body weight of the subject.

[0335] Embodiment 56. The method of any one of Embodiments 44-53, wherein the RNAi agent is administered at a respirable delivered dose (RDD) of about 0.01 mg/kg to about 5.0 mg/kg of body weight of the subject.

[0336] Embodiment 57. The method of any one of Embodiments 44-53, wherein the RNAi agent is administered at a respirable delivered dose (RDD) of about 0.1 mg/kg to about 2.0 mg/kg of body weight of the subject.

[0337] Embodiment 58. The method of any of Embodiments 44-57, wherein the RNAi agent is administered in two or more doses.

[0338] Embodiment 59. Use of the RNAi agent of any one of Embodiments 1-35, for the treatment of a disease, disorder, or symptom that is mediated at least in part by Mucin 5AC protein levels.

[0339] Embodiment 60. Use of the composition according to any one of Embodiments 36-43, for the treatment of a disease, disorder, or symptom that is mediated at least in part by Mucin 5AC gene expression.

[0340] Embodiment 61. Use of the composition according to any one of Embodiments 36-43, for the manufacture of a medicament for treatment of a disease, disorder, or symptom that is mediated at least in part by Mucin 5AC gene expression.

[0341] Embodiment 62. The use of any one of Embodiments 59-61, wherein the disease is asthma (including severe asthma).

[0342] Embodiment 63. A method of making an RNAi agent of any one of Embodiments 1-35, comprising annealing a sense strand and an antisense strand to form a double-stranded ribonucleic acid molecule.

[0343] Embodiment 64. The method of Embodiment 63, wherein the sense strand comprises a targeting ligand.

[0344] Embodiment 65. The method of Embodiment 64, comprising conjugating a targeting ligand to the sense strand.

[0345] Embodiment 66. An RNAi agent for inhibiting expression of a Mucin 5AC gene, comprising:
[0346] an antisense strand comprising at least 15 contiguous nucleotides differing by 0, 1, 2, or 3 nucleotides from any one of the sequences provided in Table 2, Table 3, or Table 11; and a sense strand comprising a nucleotide sequence that is at least partially complementary to the antisense strand.

[0347] Embodiment 67. An RNAi agent for inhibiting expression of a Mucin 5AC (MUC5AC) gene, comprising:
[0348] an antisense strand comprising at least 15 contiguous nucleotides differing by 0, 1, 2, or 3 nucleotides from any one of the sequences disclosed in Table 2 or Table 3; and a sense strand comprising a nucleotide sequence that is at least partially complementary to the antisense strand.

[0349] Embodiment 68. An RNAi agent for inhibiting expression of a Mucin 5AC (MUC5AC) gene, comprising:
[0350] a sense strand comprising at least 15 contiguous nucleotides differing by 0, 1, 2, or 3 nucleotides from a stretch of the same length of nucleotides of SEQ ID NO:1; and an antisense strand comprising a nucleotide sequence that is at least partially complementary to the sense strand.

[0351] Embodiment 69. An inhibitor of a MUC5AC gene comprising an antisense nucleotide sequence having at least 15 contiguous nucleotides differing by 0, 1, 2, or 3 nucleotides that are complementary to any of the target nucleotide sequences in Table 1.

[0352] Embodiment 70. An RNAi agent comprising (i) an antisense strand comprising a nucleotide sequence having at least 15 contiguous nucleotides differing by 0, 1, 2, or 3 nucleotides from any of the nucleotide sequences in Table 2, Table 3 or Table 11, and (ii) a sense strand at least partially complementary to the antisense strand.

[0353] Embodiment 71. An RNAi agent comprising (i) an antisense strand comprising, consisting of, or consisting essentially of a nucleotide sequence from any of the antisense strand nucleotide sequences in Table 2, Table 3 or Table 11, and (ii) a sense strand comprising, consisting of, or consisting essentially of a nucleotide sequence from any of the sense strand nucleotide sequences in Table 2, Table 4, Table 5, Table 6, Table 7, or Table 11.

[0354] Embodiment 72. An RNAi agent comprising an antisense strand and sense strand annealed to form a duplex, wherein the duplex has the structure of any of the duplexes set forth in Table 8A, Table 8B, Table 8C, Table 9, Table 10, or Table 11.

[0355] Embodiment 73. An RNAi agent for inhibiting expression of a Mucin 5AC gene, comprising:
[0356] an antisense strand comprising at least 17 contiguous nucleotides differing by 0 or 1 nucleotides from any one of the sequences provided in Table 2 or Table 3; and
[0357] a sense strand comprising a nucleotide sequence that is at least partially complementary to the antisense strand,
   wherein optionally all or substantially all of the nucleotides of the sense strand and the antisense strand modified nucleotides, and wherein the sense strand is optionally linked to a targeting ligand.

[0358] The above provided embodiments and items are now illustrated with the following, non-limiting examples.

### EXAMPLES

### Example 1. Synthesis of MUC5AC RNAi Agents

[0359] MUC5AC RNAi agent duplexes disclosed herein were synthesized in accordance with the following:

### A. Synthesis.

[0360] The sense and antisense strands of the MUC5AC RNAi agents were synthesized according to phosphoramidite technology on solid phase used in oligonucleotide synthesis. Depending on the scale, a MerMade96E® (Bioautomation), a MerMadel2® (Bioautomation), or an OP Pilot 100 (GE Healthcare) was used. Syntheses were performed on a solid support made of controlled pore glass (CPG, 500 Å or 600 Å, obtained from Prime Synthesis, Aston, PA, USA). All RNA and 2′-modified RNA phosphoramidites were purchased from Thermo Fisher Scientific (Milwaukee, WI, USA). Specifically, the 2′-O-methyl phosphoramidites that were used included the following: (5′-O-dimethoxytrityl-N⁶-(benzoyl)-2′-O-methyl-adenosine-3′-O-(2-cyanoethyl-N,N-diisopropylamino) phosphoramidite, 5′-O-dimethoxy-trityl-N⁴-(acetyl)-2′-O-methyl-cytidine-3′-O-(2-cyanoethyl-N,N-diisopropyl-amino) phosphoramidite, (5′-O-dimethoxytrityl-N²-(isobutyryl)-2′-O-methyl-guanosine-3′-O-(2-cyanoethyl-N,N-diisopropylamino) phosphoramidite, and 5′-O-dimethoxytrityl-2′-O-methyl-uridine-3′-O-(2-cyanoethyl-N,N-diisopropylamino) phosphoramidite. The 2′-deoxy-2′-fluoro-phosphoramidites carried the same protecting groups as the 2′-O-methyl RNA amidites. 5′-dimethoxytrityl-2′-O-methyl-inosine-3′-O-(2-cyanoethyl-N,N-diisopropylamino) phosphoramidites were purchased from Glen Research (Virginia). The inverted abasic (3′-O-dimethoxytrityl-2′-deoxyribose-5′-O-(2-cyanoethyl-N,N-diisopropylamino) phosphoramidites were purchased from ChemGenes (Wilmington, MA, USA). The following UNA phosphoramidites were used: 5′-(4,4′-Dimethoxytrityl)-N6-(benzoyl)-2′,3′-seco-adenosine, 2′-benzoyl-3′-[(2-cyanoethyl)-(N,N-diisopropyl)]-phosphoramidite, 5′-(4,4′-Dimethoxytrityl)-N-acetyl-2′,3′-seco-cytosine, 2′-benzoyl-3′-[(2-cyanoethyl)-(N,N-diisopropyl)]-phosphoramidite, 5′-(4,4′-Dimethoxytrityl)-N-isobutyryl-2′,3′-seco-guanosine, 2′-benzoyl-3′-[(2-cyanoethyl)-(N,N-diisopropyl)]-phosphoramidite, and 5′-(4,4′-Dimethoxy-trityl)-2′,3′-seco-uridine, 2′-benzoyl-3′-[(2-cyanoethyl)-(N,N-diisopropyl)]-phosphoramidite. TFA aminolink phosphoramidites were also commercially purchased (ThermoFisher). Linker L6 was purchased as propargyl-PEG5-NHS from BroadPharm (catalog #BP-20907) and coupled to the NH₂—C₆ group from an aminolink phosphoramidite to form -L6-C6-, using standard coupling conditions. The linker Alk-cyHex was similarly commercially purchased from Lumiprobe (alkyne phosphoramidite, 5′-terminal) as a propargyl-containing compound phosphoramidite compound to form the linker -Alk-cyHex-. In each case, phosphorothioate linkages were introduced as specified using the conditions set forth herein. The cyclopropyl phosphonate phosphoramidites were synthesized in accordance with International Patent Application Publication No. WO 2017/214112 (see also Altenhofer et. al., Chem. Communications (Royal Soc. Chem.), 57(55):6808-6811 (2021)).

[0361] Tri-alkyne-containing phosphoramidites were dissolved in anhydrous dichloromethane or anhydrous acetonitrile (50 mM), while all other amidites were dissolved in anhydrous acetonitrile (50 mM) and molecular sieves (3 Å) were added. 5-Benzylthio-1H-tetrazole (BTT, 250 mM in acetonitrile) or 5-Ethylthio-1H-tetrazole (ETT, 250 mM in acetonitrile) was used as activator solution. Coupling times were 10 minutes (RNA), 90 seconds (2′ O-Me), and 60 seconds (2′ F). In order to introduce phosphorothioate linkages, a 100 mM solution of 3-phenyl 1,2,4-dithiazoline-5-one (POS, obtained from PolyOrg, Inc., Leominster, MA, USA) in anhydrous acetonitrile was employed.

[0362] Alternatively, tri-alkyne moieties were introduced post-synthetically (see section E, below). For this route, the sense strand was functionalized with a 5′ and/or 3′ terminal nucleotide containing a primary amine. TFA aminolink phosphoramidite was dissolved in anhydrous acetonitrile (50 mM) and molecular sieves (3 Å) were added. 5-Benzylthio-1H-tetrazole (BTT, 250 mM in acetonitrile) or 5-Ethylthio-1H-tetrazole (ETT, 250 mM in acetonitrile) was used as activator solution. Coupling times were 10 minutes (RNA), 90 seconds (2′ O-Me), and 60 seconds (2′ F). In order to introduce phosphorothioate linkages, a 100 mM solution of 3-phenyl 1,2,4-dithiazoline-5-one (POS, obtained from PolyOrg, Inc., Leominster, MA, USA) in anhydrous acetonitrile was employed.

### B. Cleavage and Deprotection of Support Bound Oligomer.

[0363] After finalization of the solid phase synthesis, the dried solid support was treated with a 1:1 volume solution of 40 wt. % methylamine in water and 28% to 31% ammonium hydroxide solution (Aldrich) for 1.5 hours at 30° C. The solution was evaporated and the solid residue was reconstituted in water (see below).

### C. Purification.

[0364] Crude oligomers were purified by anionic exchange HPLC using a TSKgel SuperQ-5PW 13 μm column and Shimadzu LC-8 system. Buffer A was 20 mM Tris, 5 mM EDTA, pH 9.0 and contained 20% Acetonitrile and buffer B was the same as buffer A with the addition of 1.5 M sodium chloride. UV traces at 260 nm were recorded. Appropriate fractions were pooled then run on size exclusion HPLC using a GE Healthcare XK 16/40 column packed with Sephadex G-25 fine with a running buffer of 100 mM ammonium bicarbonate, pH 6.7 and 20% Acetonitrile or filtered water. Alternatively, pooled fractions were desalted and exchanged into an appropriate buffer or solvent system via tangential flow filtration.

### D. Annealing.

[0365] Complementary strands were mixed by combining equimolar RNA solutions (sense and antisense) in 1×PBS (Phosphate-Buffered Saline, 1×, Corning, Cellgro) to form the RNAi agents. Some RNAi agents were lyophilized and stored at −15 to −25° C. Duplex concentration was determined by measuring the solution absorbance on a UV-Vis spectrometer in 1×PBS. The solution absorbance at 260 nm was then multiplied by a conversion factor (0.050 mg/(mL-cm)) and the dilution factor to determine the duplex concentration.

### E. Conjugation of Tri-Alkyne Linker.

[0366] In some embodiments a tri-alkyne linker is conjugated to the sense strand of the RNAi agent on resin as a phosphoramidite (see Example 1G for the synthesis of an example tri-alkyne linker phosphoramidite and Example TA for the conjugation of the phosphoramidite.). In other embodiments, a tri-alkyne linker may be conjugated to the sense strand following cleavage from the resin, described as follows: either prior to or after annealing, in some embodiments, the 5′ or 3′ amine functionalized sense strand is conjugated to a tri-alkyne linker. An example tri-alkyne linker structure that can be used in forming the constructs disclosed herein is as follows:

[chemical structure]

To conjugate the tri-alkyne linker to the annealed duplex, amine-functionalized duplex was dissolved in 90% DMSO/10% H₂O, at ˜50-70 mg/mL. 40 equivalents triethylamine was added, followed by 3 equivalents tri-alkyne-PNP. Once complete, the conjugate was precipitated twice in a solvent system of 1× phosphate buffered saline/acetonitrile (1:14 ratio), and dried.

### F. Synthesis of Targeting Ligand SM6.1

### ((S)-3-(4-(4-((14-azido-3,6,9,12-tetraoxatetradecyl)oxy)naphthalen-1-yl)phenyl)-3-(2-(4-((4-methylpyridin-2-yl)amino)butanamido)acetamido)propanoic acid)

[chemical structure]

[0367] Compound 5 (tert-Butyl(4-methylpyridin-2-yl)carbamate) (0.501 g, 2.406 mmol, 1 equiv.) was dissolved in DMF (17 mL). To the mixture was added NaH (0.116 mg, 3.01 mmol, 1.25 eq, 60% dispersion in oil) The mixture stirred for 10 min before adding Compound 20 (Ethyl 4-Bromobutyrate (0.745 g, 3.82 mmol, 0.547 mL)) (Sigma 167118). After 3 hours the reaction was quenched with ethanol (18 mL) and concentrated. The concentrate was dissolved in DCM (50 mL) and washed with saturated aq. NaCl solution (1×50 mL), dried over Na₂SO₄, filtered and concentrated. The product was purified on silica column, gradient 0-5% Methanol in DCM.

[chemical structure]

[0368] Compound 21 was dissolved (0.80 g, 2.378 mmol) in 100 mL of Acetone: 0.1 M NaOH [1:1]. The reaction was monitored by TLC (5% ethyl acetate in hexane). The organics were concentrated away, and the residue was acidified to pH 3-4 with 0.3 M Citric Acid (40 mL). The product was extracted with DCM (3×75 mL). The organics were pooled, dried over Na₂SO₄, filtered and concentrated. The product was used without further purification.

[chemical structure]

[0369] To a solution of Compound 22 (1.1 g, 3.95 mmol, 1 equiv.), Compound 45 (595 mg, 4.74 mmol, 1.2 equiv.), and TBTU (1.52 g, 4.74 mmol, 1.2 equiv.) in anhydrous DMF (10 mL) was added diisopropylethylamine (2.06 mL, 11.85 mmol, 3 equiv.) at 0° C. The reaction mixture was warmed to room temperature and stirred 3 hours. The reaction was quenched by saturated NaHCO₃ solution (10 mL). The aqueous phase was extracted with ethyl acetate (3×10 mL) and the organic phase was combined, dried over anhydrous Na₂SO₄, and concentrated. The product was separated by CombiFlash® using silica gel as the stationary phase. LC-MS: calculated [M+H]+ 366.20, found 367.

[chemical structure]

[0370] To a solution of compound 61 (2 g, 8.96 mmol, 1 equiv.), and compound 62 (2.13 mL, 17.93 mmol, 2 equiv.) in anhydrous DMF (10 mL) was added K₂CO₃ (2.48 g, 17.93 mmol, 2 equiv.) at 0° C. The reaction mixture was warmed to room temperature and stirred overnight. The reaction was quenched by water (10 mL). The aqueous phase was extracted with ethyl acetate (3×10 mL) and the organic phase was combined, dried over anhydrous Na₂SO₄, and concentrated. The product was separated by CombiFlash® using silica gel as the stationary phase.

[chemical structure]

[0371] To a solution of compound 60 (1.77 g, 4.84 mmol, 1 equiv.) in THF (5 mL) and H₂O (5 mL) was added lithium hydroxide monohydrate (0.61 g, 14.53 mmol, 3 equiv.) portion-wise at 0° C. The reaction mixture was warmed to room temperature. After stirring at room temperature for 3 hours, the reaction mixture was acidified by HCl (6 N) to pH 3.0. The aqueous phase was extracted with ethyl acetate (3×20 mL) and the organic layer was combined, dried over Na₂SO₄, and concentrated. LC-MS: calculated [M+H]+ 352.18, found 352.

[chemical structure]

[0372] To a solution of compound 63 (1.88 g, 6.0 mmol, 1.0 equiv.) in anhydrous THF (20 mL) was added n-BuLi in hexane (3.6 mL, 9.0 mmol, 1.5 equiv.) drop-wise at −78° C. The reaction was kept at −78° C. for another 1 hour. Triisopropylborate (2.08 mL, 9.0 mmol, 1.5 equiv.) was then added into the mixture at −78° C. The reaction was then warmed up to room temperature and stirred for another 1 hour. The reaction was quenched by saturated NH4Cl solution (20 mL) and the pH was adjusted to 3. The aqueous phase was extracted with EtOAc (3×20 mL) and the organic phase was combined, dried over Na₂SO₄, and concentrated.

[chemical structure]

[0373] Compound 12 (300 mg, 0.837 mmol, 1.0 equiv.), Compound 65 (349 mg, 1.256 mmol, 1.5 equiv.), XPhos Pd G2 (13 mg, 0.0167 mmol, 0.02 equiv.), and K₃PO₄ (355 mg, 1.675 mmol, 2.0 equiv.) were mixed in a round-bottom flask. The flask was sealed with a screw-cap septum, and then evacuated and backfilled with nitrogen (this process was repeated a total of 3 times). Then, THF (8 mL) and water (2 mL) were added via syringe. The mixture was bubbled with nitrogen for 20 min and the reaction was kept at room temperature for overnight. The reaction was quenched with water (10 mL), and the aqueous phase was extracted with ethyl acetate (3×10 mL). The organic phase was dried over Na₂SO₄, concentrated, and purified via CombiFlash® using silica gel as the stationary phase and was eluted with 15% EtOAc in hexane. LC-MS: calculated [M+H]+ 512.24, found 512.56.

[chemical structure]

[0374] Compound 66 (858 mg, 1.677 mmol, 1.0 equiv.) was cooled by ice bath. HCl in dioxane (8.4 mL, 33.54 mmol, 20 equiv.) was added into the flask. The reaction was warmed to room temperature and stirred for another 1 hr. The solvent was removed by rotary evaporator and the product was directly used without further purification. LC-MS: calculated [M+H]+ 412.18, found 412.46.

[chemical structure]

[0375] To a solution of compound 64 (500 mg, 1.423 mmol, 1 equiv.), compound 67 (669 mg, 1.494 mmol, 1.05 equiv.), and TBTU (548 mg, 0.492 mmol, 1.2 equiv.) in anhydrous DMF (15 mL) was added diisopropylethylamine (0.744 mL, 4.268 mmol, 3 equiv.) at 0° C. The reaction mixture was warmed to room temperature and stirred for another 1 hr. The reaction was quenched by saturated NaHCO₃ aqueous solution (10 mL) and the product was extracted with ethyl acetate (3×20 mL). The organic phase was combined, dried over Na₂SO₄, and concentrated. The product was purified by CombiFlash® using silica gel as the stationary phase and was eluted with 3-4% methanol in DCM. The yield was 96.23%. LC-MS: calculated [M+H]+ 745.35, found 746.08.

[chemical structure]

[0376] To a solution of compound 68 (1.02 g, 1.369 mmol, 1 equiv.) in ethyl acetate (10 mL) was added 10% Pd/C (0.15 g, 50% H₂O) at room temperature. The reaction mixture was warmed to room temperature and the reaction was monitored by LC-MS. The reaction was kept at room temperature overnight. The solids were filtered through Celite® and the solvent was removed by rotary evaporator. The product was directly used without further purification. LC-MS: [M+H]+ 655.31, found 655.87.

[chemical structure]

[0377] To a solution of compound 69 (100 mg, 0.152 mmol, 1 equiv.) and azido-PEG₅-OTs (128 mg, 0.305 mmol, 2 equiv.) in anhydrous DMF (2 mL) was added K₂CO₃ (42 mg, 0.305 mmol, 2 equiv.) at 0° C. The reaction mixture was stirred for 6 hours at 80° C. The reaction was quenched by saturated NaHCO₃ solution and the aqueous layer was extracted with ethyl acetate (3×10 mL). The organic phase was combined, dried over Na₂SO₄, and concentrated. LC-MS: calculated [M+H]+ 900.40, found 901.46.

[chemical structure]

[0378] To a solution of compound 72 (59 mg, 0.0656 mmol, 1.0 equiv.) in THF (2 mL) and water (2 mL) was added lithium hydroxide (5 mg, 0.197 mmol, 3.0 equiv.) at room temperature. The mixture was stirred at room temperature for another 1 hr. The pH was adjusted to 3.0 by HCl (6N) and the aqueous phase was extracted with EtOAc (3×10 mL). The organic phase was combined, dried over Na₂SO₄, and concentrated. TFA (0.5 mL) and DCM (0.5 mL) was added into the residue and the mixture was stirred at room temperature for another 3 hr. The solvent was removed by rotary evaporator. LC-MS: calculated [M+H]+ 786.37, found 786.95.

### G. Synthesis of TriAlk14

[0379] TriAlk14 and (TriAlk14)s as shown in Table 12, above, may be synthesized using the synthetic route shown below. Compound 14 may be added to the sense strand as a phosphoramidite using standard oligonucleotide synthesis techniques, or compound 22 may be conjugated to the sense strand comprising an amine in an amide coupling reaction.

[chemical structure]

[0380] To a 3-L jacketed reactor was added 500 mL DCM and 4 (75.0 g, 0.16 mol). The internal temperature of the reaction was cooled to 0° C. and TBTU (170.0 g, 0.53 mol) was added. The suspension was then treated with the amine 5 (75.5 g, 0.53 mol) dropwise keeping the internal temperature less than 5° C. The reaction was then treated with DIPEA (72.3 g, 0.56 mol) slowly, keeping the internal temperature less than 5° C. After the addition was complete, the reaction was warmed up to 23° C. over 1 hour, and allowed to stir for 3 hours. A 10% kicker charge of all three reagents were added and allowed to stir an additional 3 hours. The reaction was deemed complete when <1% of 4 remained. The reaction mixture was washed with saturated ammonium chloride solution (2×500 mL) and once with saturated sodium bicarbonate solution (500 mL). The organic layer was then dried over sodium sulfate and concentrated to an oil. The mass of the crude oil was 188 g which contained 72% 6 by QNMR. The crude oil was carried to the next step. Calculated mass for C₄₆H₆₀N₄O₁₁=845.0 m/z. Found [M+H]=846.0.

[chemical structure]

[0381] The 121.2 g of crude oil containing 72 wt % compound 6 (86.0 g, 0.10 mol) was dissolved in DMF (344 mL) and treated with TEA (86 mL, 20 v/v %), keeping the internal temperature below 23° C. The formation of dibenzofulvene (DBF) relative to the consumption of Fmoc-amine 6 was monitored via HPLC method 1 (FIG. 2) and the reaction was complete within 10 hours. To the solution was added glutaric anhydride (12.8 g, 0.11 mol) and the intermediate amine 7 was converted to compound 8 within 2 hours. Upon completion, the DMF and TEA were removed at 30° C. under reduced pressure resulting in 100 g of a crude oil. Due to the high solubility of compound 7 in water, an aqueous workup could not be used, and chromatography is the only way to remove DBF, TMU, and glutaric anhydride. The crude oil (75 g) was purified on a Teledyne ISCO Combi-Flash® purification system in three portions. The crude oil (25 g) was loaded onto a 330 g silica column and eluted from 0-20% methanol/DCM over 30 minutes resulting in 42 g of compound 8 (54% yield over 3 steps). Calculated mass for C₃₆H₅₅N₄O₁₂=736.4 m/z. Found [M+H]=737.0.

[chemical structure]

[0382] Compound 8 (42.0 g, 0.057 mol) was co-stripped with 10 volumes of acetonitrile prior to use to remove any residual methanol from chromatography solvents. The oil was redissolved in DMF (210 mL) and cooled to 0° C. The solution was treated with 4-nitrophenol (8.7 g, 0.063 moL) followed by EDC-hydrochloride (12.0 g, 0.063 mol) and found to reach completion within 10 hours. The solution was cooled to 0° C. and 10 volumes ethyl acetate was added followed by 10 volumes saturated ammonium chloride solution, keeping the internal temperature below 15° C. The layers were allowed to separate and the ethyl acetate layer was washed with brine. The combined aqueous layers were extracted twice with 5 volumes ethyl acetate. The combined organic layers were dried over sodium sulfate and concentrated to an oil. The crude oil (55 g) was purified on a Teledyne ISCO Combi-Flash® purification system in three portions. The crude oil (25 g) was loaded onto a 330 g silica column and eluted from 0-10% methanol/DCM over 30 minutes resulting in 22 g of pure 9 (Compound 22) (50% yield). Calculated mass for C₄₂H₅₉N₅O₁₄=857.4 m/z. Found [M+H]=858.0.

[chemical structure]

[0383] A solution of ester 9 (49.0 g, 57.1 mmol) and 6-amino-1-hexanol (7.36 g, 6.28 mmol) in dichloromethane (3 volumes) was treated with triethylamine (11.56 g, 111.4 mmol) dropwise. The reaction was monitored by observing the disappearance of compound 9 on HPLC Method 1 and was found to be complete in 10 minutes. The crude reaction mixture was diluted with 5 volumes dichloromethane and washed with saturated ammonium chloride (5 volumes) and brine (5 volumes). The organic layer was dried over sodium sulfate and concentrated to an oil. The crude oil was purified on a Teledyne ISCO Combi-Flash® purification system using a 330 g silica column. The 4-nitrophenol was eluted with 100% ethyl acetate and 10 was flushed from the column using 20% methanol/DCM resulting in a colorless oil (39 g, 81% yield). Calculated mass for C₄₂H₆₉N₅O₁₂=836.0 m/z. Found [M+H]=837.0.

[chemical structure]

[0384] Alcohol 10 was co-stripped twice with 10 volumes of acetonitrile to remove any residual methanol from chromatography solvents and once more with dry dichloromethane (KF<60 ppm) to remove trace water. The alcohol 10 (2.30 g, 2.8 mmol) was dissolved in 5 volumes dry dichloromethane (KF<50 ppm) and treated with diisopropylammonium tetrazolide (188 mg, 1.1 mmol). The solution was cooled to 0° C. and treated with 2-cyanoethyl N,N,N′,N′-tetraisopropylphosphoramidite (1.00 g, 3.3 mmol) dropwise. The solution was removed from ice-bath and stirred at 20° C. The reaction was found to be complete within 3-6 hours. The reaction mixture was cooled to 0° C. and treated with 10 volumes of a 1:1 solution of saturated ammonium bicarbonate/brine and then warmed to ambient over 1 minute and allowed to stir an additional 3 minutes at 20° C. The biphasic mixture was transferred to a separatory funnel and 10 volumes of dichloromethane was added. The organic layer was separated and washed with 10 volumes of saturated sodium bicarbonate solution to hydrolyze unreacted bis-phosphorous reagent. The organic layer was dried over sodium sulfate and concentrated to an oil resulting in 3.08 g of 94 wt % Compound 14. Calculated mass for C₅₁H₈₆N₇O₁₃P=1035.6 m/z. Found [M+H]=1036.

### H. Conjugation of Targeting Ligands.

[0385] Either prior to or after annealing, the 5′ or 3′ tridentate alkyne functionalized sense strand is conjugated to targeting ligands. The following example describes the conjugation of targeting ligands to the annealed duplex: Stock solutions of 0.5M Tris(3-hydroxypropyltriazolylmethyl)amine (THPTA), 0.5M of Cu(II) sulfate pentahydrate (Cu(II)SO₄·5H₂O) and 2M solution of sodium ascorbate were prepared in deionized water. A 75 mg/mL solution in DMSO of targeting ligand was made. In a 1.5 mL centrifuge tube containing tri-alkyne functionalized duplex (3 mg, 75 μL, 40 mg/mL in deionized water, ˜15,000 g/mol), 25 μL of 1M Hepes pH 8.5 buffer is added. After vortexing, 35 μL of DMSO was added and the solution is vortexed. Targeting ligand was added to the reaction (6 equivalents/duplex, 2 equivalents/alkyne, ˜15 μL) and the solution is vortexed. Using pH paper, pH was checked and confirmed to be pH˜8. In a separate 1.5 mL centrifuge tube, 50 μL of 0.5M THPTA was mixed with 10 μL of 0.5M Cu(II)SO₄·5H₂O, vortexed, and incubated at room temp for 5 min. After 5 min, THPTA/Cu solution (7.2 μL, 6 equivalents 5:1 THPTA:Cu) was added to the reaction vial, and vortexed. Immediately afterwards, 2M ascorbate (5 μL, 50 equivalents per duplex, 16.7 per alkyne) was added to the reaction vial and vortexed. Once the reaction was complete (typically complete in 0.5-1 h), the reaction was immediately purified by non-denaturing anion exchange chromatography.

### Example 2. In Vitro Testing of MUC5AC RNAi Agents

[0386] Certain chemically modified candidate sequence duplexes shown Table 8C above (with the antisense strand sequence set forth in Table 3 and the nucleotide and end cap portion of the sense strand found in Table 6), were tested in vitro. The MUC5AC RNAi agents were prepared in accordance with the procedures set forth in Example 1.

[0387] Evaluation of MUC5AC RNAi agents in vitro was performed by transfection of A549 cells, a human lung epithelial cell line. Cells were plated at ˜7,500 cells per well in 96-well format, and each of the RNAi agent duplexes shown in Table 12 was transfected at three concentrations (10 nM, 1 nM, and 0.1 nM), using LipoFectamine RNAiMax (Thermo Fisher) transfection reagent. Relative expression of each of the MUC5AC RNAi agents was determined by qRT-PCR by comparing the expression levels of MUC5AC mRNA to an endogenous control, and normalized to untreated A549 cells (ΔΔCT analysis), as shown in Table 12.

[0388] Table 12, below, lists the AD duplex number for the sequence being examined, as well as in parenthesis the gene position being targeted by that particular RNAi agent. Thus, for example, for Duplex ID AD08101, average relative expression at 1 nM of 0.377 shows MUC5AC gene knockdown of 62.3%, and average relative expression at 0.1 nM shows inhibition of 53.0% (0.470) normalized to untreated wells (mock control).

TABLE 13
In Vitro Testing of MUC5AC RNAi Agents.

| Duplex | Avg. Rel. | High | Low | Avg. Rel. | High | Low | Avg. Rel. | High | Low |
|---|---|---|---|---|---|---|---|---|---|
| ID No. | Exp. 10 nM | (error) | (error) | Exp. 1 nM | (error) | (error) | Exp. 0.1 nM | (error) | (error) |
| AD08101 | 0.230 | 0.042 | 0.051 | 0.377 | 0.049 | 0.056 | 0.470 | 0.056 | 0.064 |
| (11014_1) | | | | | | | | | |
| AD08666 | 0.258 | 0.047 | 0.058 | 0.394 | 0.068 | 0.082 | 0.474 | 0.102 | 0.131 |
| (4993_2) | | | | | | | | | |
| AD08668 | 0.228 | 0.052 | 0.068 | 0.401 | 0.065 | 0.078 | 0.554 | 0.181 | 0.270 |
| (4993_4) | | | | | | | | | |
| AD07732 | 0.240 | 0.057 | 0.075 | 0.427 | 0.083 | 0.103 | 0.527 | 0.087 | 0.105 |
| (3099_1) | | | | | | | | | |
| AD08100 | 0.286 | 0.031 | 0.035 | 0.382 | 0.048 | 0.054 | 0.550 | 0.081 | 0.096 |
| (10206_1) | | | | | | | | | |
| AD08103 | 0.198 | 0.063 | 0.092 | 0.439 | 0.079 | 0.097 | 0.656 | 0.086 | 0.099 |
| (12965_1) | | | | | | | | | |
| AD07734 | 0.186 | 0.047 | 0.062 | 0.515 | 0.089 | 0.107 | 0.614 | 0.085 | 0.099 |
| (5347_1) | | | | | | | | | |
| AD07634 | 0.161 | 0.025 | 0.030 | 0.423 | 0.046 | 0.051 | 0.769 | 0.129 | 0.154 |
| (3535_1) | | | | | | | | | |
| AD08671 | 0.353 | 0.047 | 0.054 | 0.416 | 0.078 | 0.096 | 0.588 | 0.068 | 0.077 |
| (4992_2) | | | | | | | | | |
| AD07763 | 0.138 | 0.034 | 0.046 | 0.432 | 0.065 | 0.077 | 0.826 | 0.149 | 0.182 |
| (610_1) | | | | | | | | | |
| AD08667 | 0.293 | 0.056 | 0.069 | 0.427 | 0.051 | 0.057 | 0.677 | 0.151 | 0.195 |
| (4993_3) | | | | | | | | | |
| AD07733 | 0.253 | 0.031 | 0.036 | 0.501 | 0.084 | 0.102 | 0.655 | 0.123 | 0.152 |
| (4993_1) | | | | | | | | | |
| AD08669 | 0.302 | 0.037 | 0.042 | 0.461 | 0.057 | 0.065 | 0.658 | 0.083 | 0.094 |
| (4993_5) | | | | | | | | | |
| AD08673 | 0.369 | 0.061 | 0.073 | 0.468 | 0.060 | 0.069 | 0.624 | 0.070 | 0.079 |
| (4992_4) | | | | | | | | | |
| AD07774 | 0.182 | 0.053 | 0.074 | 0.565 | 0.088 | 0.104 | 0.860 | 0.099 | 0.112 |
| (2797_1) | | | | | | | | | |
| AD07735 | 0.288 | 0.037 | 0.043 | 0.565 | 0.097 | 0.117 | 0.774 | 0.071 | 0.078 |
| (5350_1) | | | | | | | | | |
| AD08670 | 0.360 | 0.033 | 0.036 | 0.513 | 0.072 | 0.084 | 0.814 | 0.198 | 0.261 |
| (4993_6) | | | | | | | | | |
| AD07637 | 0.539 | 0.061 | 0.069 | 0.606 | 0.057 | 0.063 | 0.674 | 0.051 | 0.055 |
| (5300_1) | | | | | | | | | |
| AD08571 | 0.250 | 0.039 | 0.047 | 0.612 | 0.046 | 0.050 | 0.978 | 0.089 | 0.099 |
| (15051_1) | | | | | | | | | |
| AD08572 | 0.389 | 0.052 | 0.059 | 0.688 | 0.080 | 0.091 | 0.819 | 0.098 | 0.112 |
| (15052_7) | | | | | | | | | |
| AD08568 | 0.448 | 0.069 | 0.082 | 0.661 | 0.080 | 0.091 | 0.789 | 0.082 | 0.092 |
| (3910_1) | | | | | | | | | |
| AD08569 | 0.282 | 0.034 | 0.038 | 0.666 | 0.096 | 0.113 | 0.978 | 0.046 | 0.048 |
| (5029_9) | | | | | | | | | |
| AD08573 | 0.398 | 0.027 | 0.029 | 0.736 | 0.069 | 0.076 | 0.814 | 0.118 | 0.138 |
| (15052_8) | | | | | | | | | |
| AD08096 | 0.359 | 0.040 | 0.045 | 0.621 | 0.076 | 0.086 | 1.008 | 0.080 | 0.087 |
| (4992_1) | | | | | | | | | |
| AD08672 | 0.432 | 0.052 | 0.059 | 0.669 | 0.057 | 0.063 | 0.925 | 0.040 | 0.042 |
| (4992_3) | | | | | | | | | |
| AD07756 | 0.372 | 0.064 | 0.078 | 0.693 | 0.053 | 0.058 | 1.082 | 0.146 | 0.169 |
| (1618_1) | | | | | | | | | |
| AD07773 | 0.446 | 0.042 | 0.046 | 0.837 | 0.117 | 0.136 | 0.935 | 0.153 | 0.183 |
| (2536_1) | | | | | | | | | |
| AD07760 | 0.379 | 0.059 | 0.070 | 0.806 | 0.141 | 0.171 | 1.096 | 0.151 | 0.175 |
| (2001_1) | | | | | | | | | |
| AD07771 | 0.389 | 0.032 | 0.035 | 0.872 | 0.093 | 0.104 | 1.205 | 0.161 | 0.185 |
| (2004_1) | | | | | | | | | |
| Mock | 1.000 | 0.164 | 0.197 | 1.000 | 0.164 | 0.197 | 1.000 | 0.164 | 0.197 |
| Control | | | | | | | | | |

### Example 3. In Vitro Testing of MUC5AC RNAi Agents

[0389] Certain chemically modified candidate sequence duplexes shown Table 8C above (with the antisense strand sequence set forth in Table 3 and the nucleotide and end cap portion of the sense strand found in Table 6), were tested in vitro. The MUC5AC RNAi agents were prepared in accordance with the procedures set forth in Example 1.

[0390] Evaluation of MUC5AC RNAi agents in vitro was performed by transfection of A549 cells, a human lung epithelial cell line. Cells were plated at ˜7,500 cells per well in 96-well format, and each of the RNAi agent duplexes shown in Table 12 was transfected at three concentrations (10 nM, 1 nM, and 0.1 nM), using LipoFectamine RNAiMax (Thermo Fisher) transfection reagent. Relative expression of each of the MUC5AC RNAi agents was determined by qRT-PCR by comparing the expression levels of MUC5AC mRNA to an endogenous control, and normalized to untreated A549 cells (ΔΔCT analysis), as shown in Table 12.

[0391] Table 12, below, lists the AD duplex number for the sequence being examined, as well as in parenthesis the gene position being targeted by that particular RNAi agent. Thus, for example, for Duplex ID AD08101, average relative expression at 1 nM of 0.377 shows MUC5AC gene knockdown of 62.3%, and average relative expression at 0.1 nM shows inhibition of 53.0% (0.470) normalized to untreated wells (mock control).

TABLE 14
In Vitro Testing of MUC5AC RNAi Agents.

| Duplex | Avg. Rel. | High | Low | Avg. Rel. | High | Low | Avg. Rel. | High | Low |
|---|---|---|---|---|---|---|---|---|---|
| ID No. | Exp. 10 nM | (error) | (error) | Exp. 1 nM | (error) | (error) | Exp. 0.1 nM | (error) | (error) |
| AD07733 | 0.156 | 0.047 | 0.067 | 0.192 | 0.030 | 0.035 | 0.336 | 0.024 | 0.026 |
| (4993_1) | | | | | | | | | |
| AD08096 | 0.171 | 0.022 | 0.026 | 0.275 | 0.035 | 0.040 | 0.406 | 0.027 | 0.028 |
| (4992_1) | | | | | | | | | |
| AD07767 | 0.140 | 0.019 | 0.022 | 0.195 | 0.097 | 0.193 | 0.536 | 0.226 | 0.392 |
| (1758_1) | | | | | | | | | |
| AD08103 | 0.197 | 0.057 | 0.080 | 0.276 | 0.042 | 0.050 | 0.409 | 0.046 | 0.052 |
| (12965_1) | | | | | | | | | |
| AD08098 | 0.172 | 0.032 | 0.039 | 0.259 | 0.076 | 0.109 | 0.466 | 0.042 | 0.046 |
| (8739_1) | | | | | | | | | |
| AD07763 | 0.094 | 0.024 | 0.032 | 0.293 | 0.033 | 0.037 | 0.514 | 0.026 | 0.027 |
| (610_1) | | | | | | | | | |
| AD08100 | 0.242 | 0.046 | 0.056 | 0.260 | 0.051 | 0.064 | 0.417 | 0.041 | 0.045 |
| (10206_1) | | | | | | | | | |
| AD08101 | 0.236 | 0.054 | 0.071 | 0.322 | 0.044 | 0.052 | 0.364 | 0.039 | 0.043 |
| (11014_1) | | | | | | | | | |
| AD07751 | 0.161 | 0.058 | 0.091 | 0.335 | 0.051 | 0.061 | 0.536 | 0.035 | 0.037 |
| (5533_1) | | | | | | | | | |
| AD07634 | 0.159 | 0.034 | 0.043 | 0.385 | 0.035 | 0.039 | 0.507 | 0.061 | 0.069 |
| (3535_1) | | | | | | | | | |
| AD07770 | 0.114 | 0.022 | 0.028 | 0.377 | 0.041 | 0.046 | 0.599 | 0.059 | 0.066 |
| (1867_1) | | | | | | | | | |
| AD07747 | 0.347 | 0.057 | 0.069 | 0.330 | 0.042 | 0.049 | 0.413 | 0.033 | 0.036 |
| (5020_1) | | | | | | | | | |
| AD07749 | 0.365 | 0.061 | 0.073 | 0.337 | 0.017 | 0.018 | 0.464 | 0.060 | 0.068 |
| (5441_1) | | | | | | | | | |
| AD08095 | 0.204 | 0.024 | 0.027 | 0.380 | 0.064 | 0.077 | 0.624 | 0.046 | 0.049 |
| (1871_1) | | | | | | | | | |
| AD08097 | 0.364 | 0.056 | 0.066 | 0.384 | 0.068 | 0.083 | 0.511 | 0.061 | 0.069 |
| (6798_1) | | | | | | | | | |
| AD07750 | 0.432 | 0.063 | 0.074 | 0.240 | 0.073 | 0.105 | 0.589 | 0.056 | 0.062 |
| (5519_1) | | | | | | | | | |
| AD07774 | 0.168 | 0.031 | 0.038 | 0.432 | 0.072 | 0.087 | 0.679 | 0.040 | 0.042 |
| (2797_1) | | | | | | | | | |
| AD07732 | 0.352 | 0.056 | 0.067 | 0.402 | 0.147 | 0.231 | 0.535 | 0.154 | 0.217 |
| (3099_1) | | | | | | | | | |
| AD07764 | 0.424 | 0.080 | 0.099 | 0.431 | 0.051 | 0.057 | 0.505 | 0.048 | 0.052 |
| (923_1) | | | | | | | | | |
| AD07771 | 0.367 | 0.064 | 0.077 | 0.493 | 0.090 | 0.109 | 0.597 | 0.078 | 0.090 |
| (2004_1) | | | | | | | | | |
| AD07748 | 0.518 | 0.131 | 0.176 | 0.413 | 0.078 | 0.095 | 0.559 | 0.068 | 0.077 |
| (5042_1) | | | | | | | | | |
| AD07768 | 0.278 | 0.039 | 0.046 | 0.561 | 0.084 | 0.099 | 0.728 | 0.041 | 0.043 |
| (1761_1) | | | | | | | | | |
| AD07756 | 0.522 | 0.081 | 0.096 | 0.464 | 0.081 | 0.099 | 0.708 | 0.052 | 0.056 |
| (1618_1) | | | | | | | | | |
| AD07772 | 0.476 | 0.055 | 0.062 | 0.588 | 0.057 | 0.063 | 0.654 | 0.070 | 0.078 |
| (2234_1) | | | | | | | | | |
| AD07773 | 0.498 | 0.039 | 0.043 | 0.596 | 0.060 | 0.067 | 0.672 | 0.055 | 0.060 |
| (2536_1) | | | | | | | | | |
| AD07746 | 0.578 | 0.058 | 0.065 | 0.671 | 0.086 | 0.099 | 0.740 | 0.052 | 0.056 |
| (4446_1) | | | | | | | | | |
| AD08094 | 0.646 | 0.056 | 0.061 | 0.721 | 0.071 | 0.079 | 0.762 | 0.076 | 0.084 |
| (1445_1) | | | | | | | | | |
| AD07766 | 0.760 | 0.103 | 0.119 | 0.806 | 0.067 | 0.072 | 0.793 | 0.082 | 0.092 |
| (1446_1) | | | | | | | | | |
| AD07745 | 0.902 | 0.194 | 0.247 | 0.840 | 0.088 | 0.098 | 0.821 | 0.049 | 0.052 |
| (4443_1) | | | | | | | | | |
| Mock | 1.000 | 0.109 | 0.122 | 1.000 | 0.109 | 0.122 | 1.000 | 0.109 | 0.122 |
| Control | | | | | | | | | |

### Example 4. House Dust Mite (HDM) Induced Allergic Asthma Model

[0392] To study the properties of certain MUC5AC RNAi agents in vivo, the house dust mite (HDM) induced allergic asthma mouse model was used. To induce mouse Muc5ac expression, female Balb/c mice (6-8 weeks in age) were administered 50 pg house dust mite protein acquired commercially in 25 μL of isotonic saline intranasally using a pipette for 5 consecutive days. 72 hours after the fifth daily dose, mice were euthanized and whole lungs were harvested for mRNA expression analysis. Compared to unchallenged, naïve mice, relative expression of mouse Muc5ac mRNA in HDM challenged mice is shown to increase approximately 100 fold.

### Example 5. In Vivo Intratracheal Administration of MUC5AC RNAi Agents in the HDM Model

[0393] The HDM induced allergic asthma mouse model described in Example 4, above, was used. The following Table 15 sets forth the dosing Groups:

TABLE 15
MUC5AC RNAi Agent and Dosing for Example 5.

| | | Study Days IT | IN Dose | Study Days IN | Animals |
|---|---|---|---|---|---|
| GROUP | IT Dose Administered | Administered | Administered | Dose Administered | Per Group |
| 1 | No treatment | N/A | No treatment | N/A | 6 |
| 2 | No treatment | N/A | Saline | Days 8-12 | 6 |
| 3 | Saline | 1, 3, 5, and 8 | Saline | Days 8-12 | 3 |
| 4 | No treatment | N/A | HDM | Days 8-12 | 6 |
| 5 | Saline | 1, 3, 5, and 8 | HDM | Days 8-12 | 4 |
| 6 | 5.0 mg/kg Tri-SM6.1-αvβ6-AD07022 | 1, 3, 5, and 8 | HDM | Days 8-12 | 4 |
| 7 | 5.0 mg/kg Tri-SM6.1-αvβ6-AD07720 | 1, 3, 5, and 8 | HDM | Days 8-12 | 5 |
| 8 | 5.0 mg/kg Tri-SM6.1-αvβ6-AD07719 | 1, 3, 5, and 8 | HDM | Days 8-12 | 5 |

[0394] As noted in Table 15 above, the mice in Group 1 received no treatment throughout. For the mice in Groups 3, 5, 6, 7 and 8, on study days 1, 3, 5, and 8, female Balb/c mice were administered a single dose of 50 microliters via a microsprayer device (Penn Century, Philadelphia, PA) suitable for intratracheal (IT) administration of isotonic saline or 5.0 mg/kg the respective MUC5AC RNAi agent formulated in isotonic saline as noted in Table 15.

[0395] As shown in Table 15, each of the MUC5AC RNAi agents (Groups 6, 7 and 8) were conjugated to a tridentate small molecule αvβ6 epithelial cell targeting ligand (Tri-SM6.1, see FIG. 1) at the 5′ terminal end of the sense strand.

[0396] The chemically modified sequences for MUC5AC RNAi agents AD07720 and AD07719 (Groups 7 and 8) are shown in Table 7B (showing duplex), Table 3 (showing respective antisense strand), and Table 5 (showing respective sense strand with linker but without tridentate small molecule αvβ6 epithelial cell targeting ligand (Tri-SM6.1).

[0397] AD07022 has mouse-specific sequences that do not have homology with the human MUC5AC gene, and were chemically modified as follows:

Tri-SM6.1-αvβ6-AD07022
Modified Sense Strand (5′→3′):
(SEQ ID NO: 1714)
Tri-SM6.1-αvβ6-(TA14)cscauacagCfAfGfuacaguuacas
(invAb)
Modified Antisense Strand (5′→3′):
(SEQ ID NO: 1713)
cPrpusGfsusAfaCfuGfuAfcUfgCfuGfuAfuGfsg

[0398] On each of Days 8 through 12, the mice in Groups 2 through 8 were administered a single dose intranasally (IN) using a pipette with 25 microliters of isotonic saline (Groups 2 and 3) or 50 micrograms of house dust mite formulated in isotonic saline (referred to in Table 15 as HDM).

[0399] Mice were sacrificed on study day 15, and total RNA was isolated from both lungs following collection and homogenization. Mouse Muc5ac mRNA expression was quantitated by probe-based quantitative PCR, normalized to mouse beta-actin expression, and expressed as fraction of vehicle control group (geometric mean, +/−95% confidence interval).

TABLE 16
Average Relative Mouse MUC5AC mRNA
at Sacrifice (Day 15) in Example 5

| | Average Relative | Low | High |
|---|---|---|---|
| Group ID | mMuc5AC mRNA | (error) | (error) |
| Group 1 (No Treatment) | 1.000 | 0.213 | 0.270 |
| Group 2 (IN Saline) | 1.941 | 0.638 | 0.951 |
| Group 3 (IT Saline & IN Saline) | 1.706 | 0.532 | 0.774 |
| Group 4 (IN HDM) | 117.876 | 26.269 | 33.801 |
| Group 5 (IT Saline & IN HDM) | 95.585 | 21.822 | 28.277 |
| Group 6 (IT 5 mg/kg Tri-SM6.1- | 13.444 | 3.410 | 4.569 |
| αvβ6-AD07022 & IN HDM) | | | |
| Group 7 (IT 5 mg/kg Tri-SM6.1- | 71.812 | 16.633 | 21.647 |
| αvβ6-AD07720 & IN HDM) | | | |
| Group 8 (IT 5 mg/kg Tri-SM6.1- | 90.537 | 27.214 | 38.910 |
| αvβ6-AD07719 & IN HDM) | | | |

[0400] The data were normalized to the non-treatment group (Group 1). As shown in the data in Table 16 above, the HDM mouse model performed as expected with respect to promoting an increase in MUC5AC expression after exposure to HDM. The data show that Groups 7 and 8, which each had nucleotide sequences targeting position 1921 of the MUC5AC gene and has homology to both the human and mouse gene transcript, provided only a very minimal reduction in MUC5AC protein compared to the HDM model mice of Groups 4 and 5 with no RNAi agent, indicating only a minimal amount of inhibition for these specific RNAi agents. Alternatively, the mouse-specific RNAi agent of AD07022 (Group 6) showed a substantial reduction in Muc5ac mouse mRNA levels (only 13.444) compared to the groups where HDM was administered without a MUC5AC RNAi agent.

### Example 6. In Vivo Intratracheal Administration of MUC5AC RNAi Agents in the HDM Model

[0401] The HDM induced allergic asthma mouse model described in Example 4, above, was used. The following Table 17 sets forth the dosing Groups:

TABLE 17
MUC5AC RNAi Agent and Dosing for Example 6.

| | | | | Study Days | Animals | Targeted |
|---|---|---|---|---|---|---|
| | | Study Days IT | IN Dose | IN Dose | Per | Gene |
| GROUP | IT Dose Administered | Administered | Administered | Administered | Group | Position |
| 1 | Saline | 1, 3, 5, and 8 | Saline | Days 8-12 | 6 | N/A |
| 2 | Saline | 1, 3, 5, and 8 | HDM | Days 8-12 | 5 | N/A |
| 3 | 5.0 mg/kg Tri-SM6.1-αvβ6-AD07022 | 1, 3, 5, and 8 | HDM | Days 8-12 | 6 | Mouse- |
| | | | | | | specific |
| 4 | 5.0 mg/kg Tri-SM6.1-αvβ6-AD08083 | 1, 3, 5, and 8 | HDM | Days 8-12 | 5 | 5029 |
| 5 | 5.0 mg/kg Tri-SM6.1-αvβ6-AD08084 | 1, 3, 5, and 8 | HDM | Days 8-12 | 5 | 5029 |
| 6 | 5.0 mg/kg Tri-SM6.1-αvβ6-AD08085 | 1, 3, 5, and 8 | HDM | Days 8-12 | 4 | 5029 |
| 7 | 5.0 mg/kg Tri-SM6.1-αvβ6-AD08086 | 1, 3, 5, and 8 | HDM | Days 8-12 | 5 | 9729 |
| 8 | 5.0 mg/kg Tri-SM6.1-αvβ6-AD08087 | 1, 3, 5, and 8 | HDM | Days 8-12 | 6 | 9729 |
| 9 | 5.0 mg/kg Tri-SM6.1-αvβ6-AD08088 | 1, 3, 5, and 8 | HDM | Days 8-12 | 5 | 15052 |
| 10 | 5.0 mg/kg Tri-SM6.1-αvβ6-AD08089 | 1, 3, 5, and 8 | HDM | Days 8-12 | 5 | 15052 |
| 11 | 5.0 mg/kg Tri-SM6.1-αvβ6-AD07022 | 1 and 8 | HDM | Days 8-12 | 5 | Mouse- |
| | | | | | | specific |

[0402] For the mice in Groups 1-10, on study days 1, 3, 5, and 8, female Balb/c mice were administered a single dose of 50 microliters via a microsprayer device (Penn Century, Philadelphia, PA) suitable for intratracheal (IT) administration of isotonic saline or 5.0 mg/kg of the respective MUC5AC RNAi agent formulated in isotonic saline as noted in Table 17. For the mice in Group 11, the MUC5AC RNAi agent was administered only on days 1 and 8.

[0403] As shown in Table 17, each of the MUC5AC RNAi agents (Groups 3-11) were conjugated to a tridentate small molecule αvβ6 epithelial cell targeting ligand (Tri-SM6.1, see FIG. 1) at the 5′ terminal end of the sense strand. The chemically modified sequences for MUC5AC RNAi agents AD08083, AD08084, AD08085, AD08086, AD08087, AD08088, and AD08089 (Groups 4 through 10) are shown in Table 7B (showing duplex), Table 3 (showing respective antisense strand), and Table 5 (showing respective sense strand with linker but without tridentate small molecule αvβ6 epithelial cell targeting ligand (Tri-SM6.1)).

[0404] AD07022 has mouse-specific sequences that do not have homology with the human MUC5AC gene, and were chemically modified as shown above in Example 5.

[0405] On each of Days 8 through 12, the mice were administered a single dose intranasally (IN) using a pipette with 25 microliters of isotonic saline (Group 2) or 50 micrograms of house dust mite formulated in isotonic saline (referred to in Table 17 as HDM).

[0406] Mice were sacrificed on study day 15, and total RNA was isolated from both lungs following collection and homogenization. Mouse Muc5ac mRNA expression was quantitated by probe-based quantitative PCR, normalized to mouse beta-actin expression, and expressed as fraction of vehicle control group (geometric mean, +/−95% confidence interval).

TABLE 18
Average Relative Mouse MUC5AC mRNA
at Sacrifice (Day 15) in Example 6

| | Average Relative | Low | High |
|---|---|---|---|
| Group ID | mMuc5ac mRNA | (error) | (error) |
| Group 1 (IT Saline & IN Saline) | 1.000 | 0.305 | 0.440 |
| Group 2 (IT Saline & IN HDM) | 115.127 | 17.128 | 20.122 |
| Group 3 (IT 5 mg/kg Tri-SM6.1- | 19.053 | 6.287 | 9.383 |
| αvβ6-AD07022 & IN HDM) | | | |
| Group 4 (IT 5 mg/kg Tri-SM6.1- | 35.333 | 13.193 | 21.054 |
| αvβ6-AD08083 & IN HDM) | | | |
| Group 5 (IT 5 mg/kg Tri-SM6.1- | 26.634 | 12.943 | 25.180 |
| αvβ6-AD08084 & IN HDM) | | | |
| Group 6 (IT 5 mg/kg Tri-SM6.1- | 34.602 | 3.503 | 3.897 |
| αvβ6-AD08085 & IN HDM) | | | |
| Group 7 (IT 5 mg/kg Tri-SM6.1- | 55.475 | 15.377 | 21.273 |
| αvβ6-AD08086 & IN HDM) | | | |
| Group 8 (IT 5 mg/kg Tri-SM6.1- | 66.631 | 19.703 | 27.976 |
| αvβ6-AD08087 & IN HDM) | | | |
| Group 9 (IT 5 mg/kg Tri-SM6.1- | 26.879 | 4.505 | 5.412 |
| αvβ6-AD08088 & IN HDM) | | | |
| Group 10 (IT 5 mg/kg Tri-SM6.1- | 14.903 | 2.441 | 2.919 |
| αvβ6-AD08089 & IN HDM) | | | |
| Group 11 (IT 5 mg/kg Tri-SM6.1- | 14.457 | 6.005 | 10.271 |
| αvβ6-AD07022 & IN HDM) | | | |

[0407] The data were normalized to the IT and IN saline-only dosed group (Group 1). As shown in the data in Table 18 above, the HDM mouse model performed as expected with respect to promoting an increase in MUC5AC expression after exposure to HDM. The data show that Groups 7 and 8, which both had nucleotide sequences targeting position 9729 of the MUC5AC gene and has homology to both the human and mouse gene transcript, provided only a moderate reduction in MUC5AC protein compared to the HDM model mice of Group 2 with no RNAi agent, indicating only a moderate amount of inhibition for these specific RNAi agents. Alternatively, the remaining MUC5AC RNAi agents tested (targeting gene position 5029 in Groups 4-6 and gene position 15052 in Groups 9 and 10) each showed substantial inhibition compared to Group 2, as did the mouse-specific MUC5AC RNAi agent of AD07022 (Group 6).

### Example 7. In Vivo Intratracheal Administration of MUC5AC RNAi Agents in Rats

[0408] The HDM induced allergic asthma mouse model described in Example 4, above, was used. The following Table 19 sets forth certain dosing Groups included in the study:

TABLE 19
MUC5AC RNAi Agent and Dosing for Example 7.

| | | | | Study Days | Animals | Targeted |
|---|---|---|---|---|---|---|
| | | Study Days IT | IN Dose | IN Dose | Per | Gene |
| GROUP | IT Dose Administered | Administered | Administered | Administered | Group | Position |
| 1 | Saline | 1, 3, 5, and 8 | Saline | Days 8-12 | 6 | N/A |
| 2 | Saline | 1, 3, 5, and 8 | HDM | Days 8-12 | 6 | N/A |
| 3 | 5.0 mg/kg Tri-SM6.1-αvβ6-AD07022 | 1, 3, 5, and 8 | HDM | Days 8-12 | 5 | Mouse- |
| | | | | | | Specific |
| 4 | 5.0 mg/kg Tri-SM6.1-αvβ6-AD08173 | 1, 3, 5, and 8 | HDM | Days 8-12 | 6 | 3535 |
| 5 | 5.0 mg/kg Tri-SM6.1-αvβ6-AD08174 | 1, 3, 5, and 8 | HDM | Days 8-12 | 6 | 3535 |
| 6 | 5.0 mg/kg Tri-SM6.1-αvβ6-AD08243 | 1, 3, 5, and 8 | HDM | Days 8-12 | 6 | 3535 |
| 7 | 5.0 mg/kg Tri-SM6.1-αvβ6-AD08244 | 1, 3, 5, and 8 | HDM | Days 8-12 | 6 | 3535 |
| 8 | 5.0 mg/kg Tri-SM6.1-αvβ6-AD08175 | 1, 3, 5, and 8 | HDM | Days 8-12 | 6 | 3535 |
| 9 | 5.0 mg/kg Tri-SM6.1-αvβ6-AD08176 | 1, 3, 5, and 8 | HDM | Days 8-12 | 6 | 3535 |
| 10 | 5.0 mg/kg Tri-SM6.1-αvβ6-AD08177 | 1, 3, 5, and 8 | HDM | Days 8-12 | 6 | 3535 |

[0409] For the mice in Groups 1-5, on study days 1, 3, 5, and 8, female Balb/c mice were administered a single dose of 50 microliters via a microsprayer device (Penn Century, Philadelphia, PA) suitable for intratracheal (IT) administration of isotonic saline or 5.0 mg/kg the respective MUC5AC RNAi agent formulated in isotonic saline as noted in Table 19.

[0410] As shown in Table 19, each of the MUC5AC RNAi agents (Groups 3-5) were conjugated to a tridentate small molecule αvβ6 epithelial cell targeting ligand (Tri-SM6.1, see FIG. 1) at the 5′ terminal end of the sense strand. The chemically modified sequences for MUC5AC RNAi agents AD08173 and AD08174 (Groups 4 and 5) are shown in Table 7B (showing duplex), Table 3 (showing respective antisense strand), and Table 5 (showing respective sense strand with linker but without tridentate small molecule αvβ6 epithelial cell targeting ligand (Tri-SM6.1)). Each of the MUC5AC RNAi agents with sequences targeting position 3535 have a mismatch in what is understood to be an important location from the mouse gene, and therefore it is expected that the MUC5AC RNAi agents would show little to no inhibitory activity in view of the mismatch.

[0411] AD07022 has mouse-specific sequences that do not have homology with the human MUC5AC gene, and were chemically modified as shown above in Example 5.

[0412] On each of Days 8 through 12, the mice were administered a single dose intranasally (IN) using a pipette with 25 microliters of isotonic saline (Group 1 only) or 50 micrograms of house dust mite formulated in isotonic saline (referred to in Table 19 as HDM).

[0413] Mice were sacrificed on study day 15, and total RNA was isolated from both lungs following collection and homogenization. Mouse Muc5ac mRNA expression was quantitated by probe-based quantitative PCR, normalized to mouse beta-actin expression, and expressed as fraction of vehicle control group (geometric mean, +/−95% confidence interval).

TABLE 20
Average Relative Mouse MUC5AC mRNA
at Sacrifice (Day 15) in Example 7

| | Average Relative | Low | High |
|---|---|---|---|
| Group ID | mMuc5ac mRNA | (error) | (error) |
| Group 1 (IT Saline & IN Saline) | 1.000 | 0.197 | 0.245 |
| Group 2 (IT Saline & IN HDM) | 132.247 | 31.248 | 40.917 |
| Group 3 (IT 5 mg/kg Tri-SM6.1- | 13.139 | 2.426 | 2.975 |
| αvβ6-AD07022 & IN HDM) | | | |
| Group 4 (IT 5 mg/kg Tri-SM6.1- | 96.522 | 13.056 | 15.098 |
| αvβ6-AD08173 & IN HDM) | | | |
| Group 5 (IT 5 mg/kg Tri-SM6.1- | 57.983 | 15.132 | 20.476 |
| αvβ6-AD08174 & IN HDM) | | | |
| Group 6 (IT 5 mg/kg Tri-SM6.1- | 55.592 | 8.761 | 10.400 |
| αvβ6-AD08243 & IN HDM) | | | |
| Group 7 (IT 5 mg/kg Tri-SM6.1- | 75.149 | 17.661 | 23.087 |
| αvβ6-AD08244 & IN HDM) | | | |
| Group 8 (IT 5 mg/kg Tri-SM6.1- | 75.420 | 10.876 | 12.708 |
| αvβ6-AD08175 & IN HDM) | | | |
| Group 9 (IT 5 mg/kg Tri-SM6.1- | 72.203 | 12.062 | 14.482 |
| αvβ6-AD08176 & IN HDM) | | | |
| Group 10 (IT 5 mg/kg Tri-SM6.1- | 67.222 | 12.063 | 14.701 |
| αvβ6-AD08177 & IN HDM) | | | |

[0414] The data were normalized to the IT and IN saline-only dosed group (Group 1). As noted above, given the nature of the mismatch to the mouse gene for the MUC5AC RNAi agents in Groups 4 and 5 (targeting position 3535 of the human gene), minimal inhibition is expected. As shown in the data in Table 20 above, the HDM mouse model performed as expected with respect to promoting an increase in MUC5AC expression after exposure to HDM, as shown in Groups 1 and 2. Unexpectedly, the MUC5AC RNAi agents targeting position 3535 still showed moderate levels of inhibition despite the mismatch to the mouse gene, indicating that MUC5AC RNAi agents targeting this position may be viable as human therapeutic candidates.

### Example 8. In Vivo Intratracheal Administration of MUC5AC RNAi Agents in the HDM Model

[0415] The HDM induced allergic asthma mouse model described in Example 4, above, was used. The following Table 17 sets forth the dosing Groups:

TABLE 21
MUC5AC RNAi Agent and Dosing for Example 8.

| | | | | Study Days | Animals | Targeted |
|---|---|---|---|---|---|---|
| | | Study Days IT | IN Dose | IN Dose | Per | Gene |
| GROUP | IT Dose Administered | Administered | Administered | Administered | Group | Position |
| 1 | Saline | 1 and 7 | Saline | Days 7-11 | 6 | N/A |
| 2 | Saline | 1 and 7 | HDM | Days 7-11 | 6 | N/A |
| 3 | 5.0 mg/kg Tri-SM6.1-αvβ6-AD07022 | 1, 2, 4 and 7 | HDM | Days 7-11 | 6 | Mouse- |
| | | | | | | specific |
| 4 | 5.0 mg/kg Tri-SM6.1-αvβ6-AD07022 | 1 and 7 | HDM | Days 7-11 | 6 | Mouse- |
| | | | | | | specific |
| 5 | 2.5 mg/kg Tri-SM6.1-αvβ6-AD07022 | 1 and 7 | HDM | Days 7-11 | 6 | Mouse- |
| | | | | | | specific |
| 6 | 1.0 mg/kg Tri-SM6.1-αvβ6-AD07022 | 1 and 7 | HDM | Days 7-11 | 6 | Mouse- |
| | | | | | | specific |
| 7 | 5.0 mg/kg Tri-SM6.1-αvβ6-AD08089 | 1, 2, 4 and 7 | HDM | Days 7-11 | 6 | 15052 |
| 8 | 5.0 mg/kg Tri-SM6.1-αvβ6-AD08089 | 1 and 7 | HDM | Days 7-11 | 6 | 15052 |
| 9 | 2.5 mg/kg Tri-SM6.1-αvβ6-AD08089 | 1 and 7 | HDM | Days 7-11 | 6 | 15052 |
| 10 | 1.0 mg/kg Tri-SM6.1-αvβ6-AD08089 | 1 and 7 | HDM | Days 7-11 | 6 | 15052 |
| 11 | 1.0 mg/kg Tri-SM6.1-αvβ6-AD08089 | 1 | HDM | Days 7-11 | 6 | 15052 |

[0416] Female Balb/c mice were administered a single dose of 50 microliters via a microsprayer device (Penn Century, Philadelphia, PA) suitable for intratracheal (IT) administration of isotonic saline or an MUC5AC RNAi agent formulated in isotonic saline, on the dates and at the concentrations set forth in Table 21 above.

[0417] As shown in Table 21, each of the MUC5AC RNAi agents (Groups 3-11) were conjugated to a tridentate small molecule αvβ6 epithelial cell targeting ligand (see FIG. 1) at the 5′ terminal end of the sense strand. The chemically modified sequences for MUC5AC RNAi agents AD08089 is shown in Table 7B (showing duplex), Table 3 (showing respective antisense strand), and Table 5 (showing respective sense strand with linker but without tridentate small molecule αvβ6 epithelial cell targeting ligand).

[0418] AD07022 has mouse-specific sequences that do not have homology with the human MUC5AC gene, and were chemically modified as shown above in Example 5.

[0419] On each of Days 7 through 11, the mice were administered a single dose intranasally (IN) using a pipette with 25 microliters of isotonic saline (Group 1) or 50 micrograms of house dust mite formulated in isotonic saline (referred to in Table 21 as HDM).

[0420] Mice were sacrificed on study day 14, and total RNA was isolated from both lungs following collection and homogenization. Mouse Muc5ac mRNA expression was quantitated by probe-based quantitative PCR, normalized to mouse beta-actin expression, and expressed as fraction of vehicle control group (geometric mean, +/−95% confidence interval).

TABLE 22
Average Relative Mouse MUC5AC mRNA at Sacrifice (Day 14) in Example 8

| | Average Relative | Low | High |
|---|---|---|---|
| Group ID | mMuc5ac mRNA | (error) | (error) |
| Group 1 (IT Saline & IN Saline) | 1.000 | 0.315 | 0.459 |
| Group 2 (IT Saline & IN HDM) | 112.848 | 44.187 | 72.623 |
| Group 3 (IT 5.0 mg/kg Tri-SM6.1-αvβ6- | 12.455 | 3.896 | 5.669 |
| AD07022 (days 1, 2, 4, & 7) & IN HDM) | | | |
| Group 4 (IT 5.0 mg/kg Tri-SM6.1-αvβ6- | 16.521 | 4.908 | 6.982 |
| AD07022 (days 1 & 7) & IN HDM) | | | |
| Group 5 (IT 2.5 mg/kg Tri-SM6.1-αvβ6- | 26.846 | 5.096 | 6.290 |
| AD07022 & IN HDM) | | | |
| Group 6 (IT 1.0 mg/kg Tri-SM6.1-αvβ6- | 26.521 | 9.295 | 14.311 |
| AD07022 & IN HDM) | | | |
| Group 7 (IT 5.0 mg/kg Tri-SM6.1-αvβ6- | 10.978 | 3.101 | 4.322 |
| AD08089 (days 1, 2, 4, & 7) & IN HDM) | | | |
| Group 8 (IT 5.0 mg/kg Tri-SM6.1-αvβ6- | 17.629 | 6.752 | 10.944 |
| AD08089 (days 1 & 7) & IN HDM) | | | |
| Group 9 (IT 2.5 mg/kg Tri-SM6.1-αvβ6- | 17.746 | 4.647 | 6.296 |
| AD08089 & IN HDM) | | | |
| Group 10 (IT 1.0 mg/kg Tri-SM6.1-αvβ6- | 21.106 | 4.109 | 5.103 |
| AD08089 & IN HDM) | | | |
| Group 11 (IT 1.0 mg/kg Tri-SM6.1-αvβ6- | 42.413 | 14.428 | 21.868 |
| AD08089 (day 1 only) & IN HDM) | | | |

[0421] The data were normalized to the IT and IN saline-only dosed group (Group 1). As shown in the data in Table 22 above, the HDM mouse model performed as expected with respect to promoting an increase in MUC5AC expression after exposure to HDM. The data show that AD08089, which has nucleotide sequences targeting position 15052 of the MUC5AC gene and has homology to both the human and mouse gene transcript, provided substantial inhibition of MUC5AC and was generally comparable to the highly active mouse-specific MUC5AC RNAi agent of AD07022.

### Example 9. In Vivo Inhaled Aerosolized Administration of MUC5AC RNAi Agents in Cynomolgus Monkeys

[0422] On study day 1, male cynomolgus monkeys were administered a single dose on each of days 1, 8, and 15 at 1 mg/kg pulmonary deposited dose (PDD) of the MUC5AC RNAi agent AC001305 or AC001306. Using a vibrating mesh nebulizer (Aeroneb Solo), aerosol was delivered to restrained, anesthetized monkeys intubated intratracheally. Intubated animals were connected to a ventilator, which was used to control respiratory minute volume. Test article aerosol was generated via an Aeroneb Solo mesh nebulizer connected in-line with the exposure system. Exposures times were determined from aerosol trials in which the efficiency of the system was determined by placing a filter at the end of the endotracheal tube, collecting the aerosol during the course of the exposure. The MUC5AC RNAi agent was conjugated to a tridentate small molecule αvβ6 epithelial cell targeting ligand (see FIG. 1) at the 5′ terminal end of the sense strand, formulated in isotonic saline. The chemically modified sequences for MUC5AC RNAi agents AC001305 and AC001306 are shown in Table 11. The antisense strand sequence of AC001305 is also shown as AM12165 in Table 3, and the antisense strand sequence of AC001306 is also shown as AM12166 in Table 3, both of which target position 4993 of the MUC5AC gene.

[0423] The dosing groups were as described in the following Table 23:

TABLE 23
MUC5AC RNAi Agent and Dosing for Example 9
Group ID

Group 1 (isotonic saline on Days 1, 8, 15
Group 2 (1.0 mg/kg pulmonary deposited
dose AC001305 on Days 1, 8, 15
Group 3 (1.0 mg/kg pulmonary deposited
dose AC001306 on Days 1, 8, 15

[0424] Two (2) monkeys were dosed per group. Monkeys were sacrificed on study day 22, and total RNA was isolated from lung samples following collection and homogenization. The data in Table 24, below, shows mRNA expression sampled from the distal left caudal lobe. Cynomolgus monkey MUC5AC mRNA expression was quantitated by probe-based quantitative PCR, normalized to Cynomolgus monkey beta-actin expression, and expressed as fraction of vehicle control group (geometric mean, +/−95% confidence interval).

TABLE 24A
Cynomolgus Monkey Mucosal Tissue Muc5ac mRNA
Relative Expression at Sacrifice in Example 9

| | Relative | | |
|---|---|---|---|
| | cMuc5ac mRNA | | |
| | Expression | Low | High |
| Group ID | (n = 2) | (error) | (error) |
| Group 1 (isotonic saline) | 1.000 | 0.386 | 0.628 |
| Group 2 (1.0 mg/kg deposited | 0.034 | 0.010 | 0.015 |
| dose AC001305 on Days 1, 8, 15) | | | |
| Group 3 (1.0 mg/kg deposited | 0.171 | 0.085 | 0.169 |
| dose AC001306 on Days 1, 8, 15 | | | |

TABLE 24B
Cynomolgus Monkey Right Cranial Hilar Muc5ac mRNA
Relative Expression at Sacrifice in Example 9

| | Relative | | |
|---|---|---|---|
| | cMuc5ac mRNA | | |
| | Expression | Low | High |
| Group ID | (n = 2) | (error) | (error) |
| Group 1 (isotonic saline) | 1.000 | 0.708 | 2.421 |
| Group 2 (1.0 mg/kg deposited | 0.034 | 0.010 | 0.015 |
| dose AC001305 on Days 1, 8, 15) | | | |
| Group 3 (1.0 mg/kg deposited | 0.180 | 0.089 | 0.174 |
| dose AC001306 on Days 1, 8, 15 | | | |

TABLE 24C
Cynomolgus Monkey Right Cranial Mid Airway Muc5ac mRNA
Relative Expression at Sacrifice in Example 9

| | Relative | | |
|---|---|---|---|
| | cMuc5ac mRNA | | |
| | Expression | Low | High |
| Group ID | (n = 2) | (error) | (error) |
| Group 1 (isotonic saline) | 1.000 | 0.489 | 0.956 |
| Group 2 (1.0 mg/kg deposited | 0.162 | 0.099 | 0.256 |
| dose AC001305 on Days 1, 8, 15) | | | |
| Group 3 (1.0 mg/kg deposited | 0.077 | 0.041 | 0.086 |
| dose AC001306 on Days 1, 8, 15 | | | |

[0425] As reported in Tables 24A, 24B, and 24C above, the MUC5AC RNAi agents

### Example 10. Aerosolized Administration of MUC5AC RNAi Agents in Sheep

[0426] Sheep exposed to inhaled ascaris antigen exhibit responses typical of allergic asthma, including an acute phase response (AR), late phase response (LR), and airway hyperreactivity (AHR) as shown by Abraham et. al. (Am Rev Respir Dis., 1983), and the model has been shown to respond well to standard of care therapies (Caniga, et. al., J Inflamm., 2013). Accordingly, the model may be used to determine the impact of sheep Muc5ac (sMuc5ac) mRNA silencing on airway mechanics and AHR upon treatment with MUC5AC RNAi agents. Test article delivery to intubated sheep, airway mechanics assessments detecting changes in pulmonary resistance (RL) following challenge with Ascaris suum antigen, and AHR assessments by performing cumulative concentration response curves to inhaled carbachol were performed according to published procedures (Abraham et. al., J Clin Invest., 1994).

[0427] Two (2) ascaris-sensitive sheep with previously established responses to Ascaris suum challenge were administered 1 mg/kg pulmonary deposited dose levels of AC000480 on days 1, 8 and 15. The chemical structure of AC000480 is shown, for example, in Table 11 and is designed to target position 3535 on the MUC5AC gene. On day 21, AHR was assessed by determining the cumulative carbachol concentration (in breath units, BU) that increased RL to 400% over the post-1×PBS value (PC₄₀₀). On day 22, sheep were challenged with Ascaris suum extract, and R_{L} was monitored out to 8 hours post-challenge. On day 23, AHR was again assessed in the same manner as on day 21. To monitor duration of effect, sheep were again challenged with Ascaris suum extract on day 51, bracketed on day 50 and day 52 with assessments of AHR.

TABLE 25
Airway Mechanics Results

| | | | Control Trial (no treatment) | | | | Drug Trial: Day 22 | | | | Drug Trial: Day 51 | | | |
|---|---|---|---|---|---|---|---|---|---|---|---|---|---|---|
| | | | Animal # | | | | Animal # | | | | Animal # | | | |
| Timepoint | | | 2489 | 2497 | Mean | S.D. | 2489 | 2497 | Mean | S.D. | 2489 | 2497 | Mean | S.D. |
| Baseline | | RL | 0.99 | 0.99 | 0.99 | 0.00 | 1.00 | 1.00 | 1.00 | 0.00 | 1.00 | 1.00 | 1.00 | 0.00 |
| Post- | | RL | 6.66 | 6.62 | 6.64 | 0.03 | 4.28 | 5.21 | 4.75 | 0.66 | 6.35 | 6.38 | 6.37 | 0.02 |
| Ascaris | | % | 573% | 569% | 571% | 3% | 328% | 421% | 375% | 66% | 535% | 538% | 537% | 2% |
| 1 | h | RL | 4.51 | 4.40 | 4.46 | 0.08 | 2.35 | 3.59 | 2.97 | 0.88 | 4.60 | 4.61 | 4.61 | 0.01 |
| | | % | 356% | 344% | 350% | 8% | 135% | 259% | 197% | 88% | 360% | 361% | 361% | 1% |
| 2 | h | RL | 2.53 | 2.57 | 2.55 | 0.03 | 1.81 | 1.66 | 1.74 | 0.11 | 2.42 | 2.64 | 2.53 | 0.16 |
| | | % | 156% | 160% | 158% | 3% | 81% | 66% | 74% | 11% | 142% | 164% | 153% | 16% |
| 3 | h | RL | 1.55 | 1.53 | 1.54 | 0.01 | 1.37 | 1.36 | 1.37 | 0.01 | 1.68 | 1.62 | 1.65 | 0.04 |
| | | % | 57% | 55% | 56% | 1% | 37% | 36% | 37% | 1% | 68% | 62% | 65% | 4% |
| 4 | h | RL | 1.06 | 1.21 | 1.14 | 0.11 | 1.05 | 1.09 | 1.07 | 0.03 | 1.05 | 1.07 | 1.06 | 0.01 |
| | | % | 7% | 22% | 15% | 11% | 5% | 9% | 7% | 3% | 5% | 7% | 6% | 1% |
| 5 | h | RL | 1.52 | 1.66 | 1.59 | 0.10 | 1.14 | 1.19 | 1.17 | 0.04 | 1.64 | 1.55 | 1.60 | 0.06 |
| | | % | 54% | 68% | 61% | 10% | 14% | 19% | 17% | 4% | 64% | 55% | 60% | 6% |
| 6 | h | RL | 2.13 | 2.09 | 2.11 | 0.03 | 1.28 | 1.34 | 1.31 | 0.04 | 2.07 | 2.18 | 2.13 | 0.08 |
| | | % | 115% | 111% | 113% | 3% | 28% | 34% | 31% | 4% | 107% | 118% | 113% | 8% |
| 6.5 | h | RL | 2.26 | 2.21 | 2.24 | 0.04 | 1.51 | 1.49 | 1.50 | 0.01 | 2.22 | 2.26 | 2.24 | 0.03 |
| | | % | 128% | 123% | 126% | 4% | 51% | 49% | 50% | 1% | 122% | 126% | 124% | 3% |
| 7 | h | RL | 2.32 | 2.26 | 2.29 | 0.04 | 1.39 | 1.40 | 1.40 | 0.01 | 2.37 | 2.29 | 2.33 | 0.06 |
| | | % | 134% | 128% | 131% | 4% | 39% | 40% | 40% | 1% | 137% | 129% | 133% | 6% |
| 7.5 | h | RL | 2.12 | 2.16 | 2.14 | 0.03 | 1.27 | 1.35 | 1.31 | 0.06 | 2.32 | 2.05 | 2.19 | 0.19 |
| | | % | 114% | 118% | 116% | 3% | 27% | 35% | 31% | 6% | 132% | 105% | 119% | 19% |
| 8 | h | RL | 2.08 | 2.03 | 2.06 | 0.04 | 1.16 | 1.28 | 1.22 | 0.08 | 2.12 | 2.13 | 2.13 | 0.01 |
| | | % | 110% | 105% | 108% | 4% | 16% | 28% | 22% | 8% | 112% | 113% | 113% | 1% |

TABLE 26
AHR Results

| | BU Carbachol to Produce PC400 | |
|---|---|---|
| Sheep # | 24 h pre-ascaris | 24 h post Ascaris |

Control Trial

| | | |
|---|---|---|
| 2489 | 24 | 13 |
| 2497 | 31 | 13 |

Drug Trial: Day 22

| | | |
|---|---|---|
| 2489 | 25 | 26 |
| 2497 | 26 | 25 |

Drug Trial: Day 51

| | | |
|---|---|---|
| 2489 | 26 | 13 |
| 2497 | 29 | 12 |

[0428] As shown in Table 25, treatment with AC000480 resulted in attenuation of AR as well as LR upon challenge on day 22. For example, untreated sheep display a mean LR increase of 126% in R_{L} at 6.5 h compared to baseline, where AC000480 treated sheep on day 22 challenge show a more attenuated LR increase of 50% in R_{L} at 6.5 h compared to baseline. In addition, 24 h after the day 22 ascaris challenge both AC000480 treated sheep showed no signs of ascaris induced airway hyperresponsiveness, as shown by equivalent number of carbachol breath units required to produce PC₄₀₀. In contrast, in the control trial without AC000480 treatment, sheep required approximately half the amount of carbachol breath units to induce PC₄₀₀ post-ascaris challenge, signifying airway hyperresponsiveness.

[0429] With no additional dosing after day 15, sheep returned to baseline airway mechanics and AHR upon the day 51 ascaris challenge.

### Example 11. Aerosolized Administration of MUC5AC RNAi Agents in Sheep

[0430] The sheep model of allergic asthma airway inflammation described in example 10, above, was used. Three (3) ascaris sensitive sheep with previously established responses to Ascaris suum challenge were administered 1 mg/kg pulmonary deposited dose levels of AC000482 on days 1, 8 and 15. The chemical structure of AC000482 is shown, for example, in Table 11 and is designed to target position 3535 on the MUC5AC gene. On day 21, AHR was assessed by determining the cumulative carbachol concentration (in breath units, BU) that increased R_{L} to 400% over the post-1×PBS value (PC₄₀₀). On day 22, sheep were challenged with Ascaris suum extract, and R_{L} was monitored out to 8 h post-challenge. On day 23, AHR was again assessed as on day 21.

TABLE 27
Airway Mechanics Results

| | | | Control (no treatment) | | | | | Drug Trial: Day 22 | | | | |
|---|---|---|---|---|---|---|---|---|---|---|---|---|
| | | | Animal # | | | Mean | | Animal # | | | Mean | |
| Timepoint | | | 2485 | 2515 | 2535 | Mean | S.D. | 2485 | 2515 | 2535 | Mean | S.D. |
| Baseline | | RL | 0.99 | 1.00 | 1.00 | 1.00 | 0.01 | 1.00 | 1.00 | 1.00 | 1.00 | 0.00 |
| Post- | | RL | 6.43 | 6.94 | 6.89 | 6.75 | 0.28 | 5.49 | 6.44 | 6.09 | 6.01 | 0.48 |
| Ascaris | | % | 549% | 594% | 589% | 577% | 24% | 449% | 544% | 509% | 501% | 48% |
| 1 | h | RL | 4.10 | 4.67 | 4.40 | 4.39 | 0.29 | 4.68 | 4.27 | 4.10 | 4.35 | 0.30 |
| | | % | 314% | 367% | 340% | 340% | 26% | 368% | 327% | 310% | 335% | 30% |
| 2 | h | RL | 2.62 | 2.51 | 2.64 | 2.59 | 0.07 | 2.81 | 2.10 | 2.05 | 2.32 | 0.43 |
| | | % | 165% | 151% | 164% | 160% | 8% | 181% | 110% | 105% | 132% | 43% |
| 3 | h | RL | 1.65 | 1.46 | 1.58 | 1.56 | 0.10 | 1.53 | 1.37 | 1.31 | 1.40 | 0.11 |
| | | % | 67% | 46% | 58% | 57% | 10% | 53% | 37% | 31% | 40% | 11% |
| 4 | h | RL | 1.08 | 1.09 | 1.05 | 1.07 | 0.02 | 1.09 | 1.05 | 1.04 | 1.06 | 0.03 |
| | | % | 9% | 9% | 5% | 8% | 2% | 9% | 5% | 4% | 6% | 3% |
| 5 | h | RL | 1.57 | 1.53 | 1.57 | 1.56 | 0.02 | 1.27 | 1.15 | 1.18 | 1.20 | 0.06 |
| | | % | 59% | 53% | 57% | 56% | 3% | 27% | 15% | 18% | 20% | 6% |
| 6 | h | RL | 1.87 | 2.10 | 2.03 | 2.00 | 0.12 | 1.42 | 1.32 | 1.23 | 1.32 | 0.10 |
| | | % | 89% | 110% | 103% | 101% | 11% | 42% | 32% | 23% | 32% | 10% |
| 6.5 | h | RL | 2.16 | 2.30 | 2.15 | 2.20 | 0.08 | 1.66 | 1.55 | 1.46 | 1.56 | 0.10 |
| | | % | 118% | 130% | 115% | 121% | 8% | 66% | 55% | 46% | 56% | 10% |
| 7 | h | RL | 2.20 | 2.21 | 2.23 | 2.21 | 0.02 | 1.54 | 1.41 | 1.34 | 1.43 | 0.10 |
| | | % | 122% | 121% | 123% | 122% | 1% | 54% | 41% | 34% | 43% | 10% |
| 7.5 | h | RL | 2.27 | 2.11 | 2.19 | 2.19 | 0.08 | 1.33 | 1.24 | 1.18 | 1.25 | 0.08 |
| | | % | 129% | 111% | 119% | 120% | 9% | 33% | 24% | 18% | 25% | 8% |
| 8 | h | RL | 2.10 | 2.06 | 2.14 | 2.10 | 0.04 | 1.25 | 1.16 | 1.23 | 1.21 | 0.05 |
| | | % | 112% | 106% | 114% | 111% | 4% | 25% | 16% | 23% | 21% | 5% |

TABLE 28
AHR results

| | BU Carbachol to Produce PC400 | |
|---|---|---|
| Sheep # | 24 h pre-ascaris | 24 h post Ascaris |

Control Trial

| | | |
|---|---|---|
| 2485 | 13 | 6 |
| 2515 | 22 | 12 |
| 2535 | 14 | 6 |

Drug Trial: Day 22

| | | |
|---|---|---|
| 2485 | 13 | 12 |
| 2515 | 24 | 24 |
| 2535 | 11 | 11 |

[0431] As shown in Table 27, treatment with AC000482 resulted in minimal attenuation of AR but robust attenuation of LR upon challenge on day 22. For example, untreated sheep display a mean LR increase of 1210% in R_{L} at 6.5 h compared to baseline, where AC000482 treated sheep on day 22 challenge show a more attenuated LR increase of 56% in R_{L} at 6.5 h compared to baseline. In addition, 24 h after the day 22 ascaris challenge all AC000482 treated sheep showed no signs of ascaris induced airway hyperresponsiveness, as shown by equivalent number of carbachol breath units required to produce PC₄₀₀. In contrast, in the control trial without AC000482 treatment, sheep required approximately half the amount of carbachol breath units to induce PC₄₀₀ post-ascaris challenge, signifying airway hyperresponsiveness.

### Example 12. Aerosolized Administration of MUC5AC RNAi Agents in Sheep

[0432] The sheep model of allergic asthma airway inflammation described in example 10, above, was used. Six (6) ascaris sensitive sheep with previously established responses to Ascaris suum challenge were administered either 0.5 mg/kg pulmonary deposited dose levels of AC000482 (n=3) of 0.25 mg/kg pulmonary deposited dose levels of AC000482 on days 1, 8 and 15. On day 21, AHR was assessed by determining the cumulative carbachol concentration (in breath units, BU) that increased R_{L} to 400% over the post-1×PBS value (PC₄₀₀). On day 22, sheep were challenged with Ascaris suum extract, and R_{L} was monitored out to 8 h post-challenge. On day 23, AHR was again assessed as on day 21.

TABLE 29
Airway mechanics results, 0.5 mg/kg dose level

| | | | Control (no treatment) | | | | | Drug Trial: Day 22 | | | | |
|---|---|---|---|---|---|---|---|---|---|---|---|---|
| | | | Animal # | | | Mean | | Animal # | | | Mean | |
| Timepoint | | | 2489 | 2497 | 2520 | Mean | S.D. | 2489 | 2497 | 2520 | Mean | S.D. |
| Baseline | | RL | 0.99 | 0.99 | 0.99 | 0.99 | 0.00 | 1.00 | 1.00 | 1.00 | 1.00 | 0.00 |
| Post- | | RL | 6.66 | 6.62 | 7.37 | 6.88 | 0.42 | 6.23 | 6.38 | 7.10 | 6.57 | 0.47 |
| Ascaris | | % | 573% | 569% | 644% | 595% | 43% | 523% | 538% | 610% | 557% | 47% |
| 1 | h | RL | 4.51 | 4.40 | 4.49 | 4.47 | 0.06 | 4.15 | 4.06 | 4.33 | 4.18 | 0.14 |
| | | % | 356% | 344% | 354% | 351% | 6% | 315% | 306% | 333% | 318% | 14% |
| 2 | h | RL | 2.53 | 2.57 | 2.37 | 2.49 | 0.11 | 2.25 | 2.31 | 2.10 | 2.22 | 0.11 |
| | | % | 156% | 160% | 139% | 152% | 11% | 125% | 131% | 110% | 122% | 11% |
| 3 | h | RL | 1.55 | 1.53 | 1.53 | 1.54 | 0.01 | 1.41 | 1.46 | 1.35 | 1.41 | 0.06 |
| | | % | 57% | 55% | 55% | 55% | 1% | 41% | 46% | 35% | 41% | 6% |
| 4 | h | RL | 1.06 | 1.21 | 1.12 | 1.13 | 0.08 | 1.07 | 1.02 | 1.04 | 1.04 | 0.03 |
| | | % | 7% | 22% | 13% | 14% | 8% | 7% | 2% | 4% | 4% | 3% |
| 5 | h | RL | 1.52 | 1.66 | 1.54 | 1.57 | 0.08 | 1.21 | 1.33 | 1.38 | 1.31 | 0.09 |
| | | % | 54% | 68% | 56% | 59% | 8% | 21% | 33% | 38% | 31% | 9% |
| 6 | h | RL | 2.13 | 2.09 | 2.03 | 2.08 | 0.05 | 1.46 | 1.56 | 1.52 | 1.51 | 0.05 |
| | | % | 115% | 111% | 105% | 110% | 5% | 46% | 56% | 52% | 51% | 5% |
| 6.5 | h | RL | 2.26 | 2.21 | 2.21 | 2.23 | 0.03 | 1.68 | 1.72 | 1.67 | 1.69 | 0.03 |
| | | % | 128% | 123% | 123% | 125% | 3% | 68% | 72% | 67% | 69% | 3% |
| 7 | h | RL | 2.32 | 2.26 | 2.30 | 2.29 | 0.03 | 1.62 | 1.68 | 1.61 | 1.64 | 0.04 |
| | | % | 134% | 128% | 132% | 132% | 3% | 62% | 68% | 61% | 64% | 4% |
| 7.5 | h | RL | 2.12 | 2.16 | 2.20 | 2.16 | 0.04 | 1.30 | 1.41 | 1.48 | 1.40 | 0.09 |
| | | % | 114% | 118% | 122% | 118% | 4% | 30% | 41% | 48% | 40% | 9% |
| 8 | h | RL | 2.08 | 2.03 | 2.12 | 2.08 | 0.05 | 1.25 | 1.26 | 1.13 | 1.21 | 0.07 |

| | | | | | | | | | | |
|---|---|---|---|---|---|---|---|---|---|---|
| % | 110% | 105% | 114% | 110% | 5% | 25% | 26% | 13% | 21% | 7% |

TABLE 30
Airway mechanics results, 0.25 mg/kg dose level

| | | | Control (no treatment) | | | | | Drug Trial: Day 22 | | | | |
|---|---|---|---|---|---|---|---|---|---|---|---|---|
| | | | Animal # | | | Mean | | Animal # | | | Mean | |
| Timepoint | | | 2457 | 2517 | 2539 | Mean | S.D. | 2457 | 2517 | 2539 | Mean | S.D. |
| Baseline | | RL | 1.00 | 1.01 | 1.00 | 1.00 | 0.01 | 1.00 | 1.00 | 1.00 | 1.00 | 0.00 |
| Post- | | RL | 6.63 | 7.29 | 6.03 | 6.65 | 0.63 | 6.50 | 7.03 | 6.26 | 6.60 | 0.39 |
| Ascaris | | % | 563% | 622% | 503% | 563% | 59% | 550% | 603% | 526% | 560% | 39% |
| 1 | h | RL | 4.15 | 4.26 | 4.50 | 4.30 | 0.18 | 4.09 | 4.10 | 4.11 | 4.10 | 0.01 |
| | | % | 315% | 322% | 350% | 329% | 19% | 309% | 310% | 311% | 310% | 1% |
| 2 | h | RL | 2.73 | 2.47 | 2.59 | 2.60 | 0.13 | 2.23 | 2.33 | 2.46 | 2.34 | 0.12 |
| | | % | 173% | 145% | 159% | 159% | 14% | 123% | 133% | 146% | 134% | 12% |
| 3 | h | RL | 1.54 | 1.37 | 1.62 | 1.51 | 0.13 | 1.45 | 1.27 | 1.54 | 1.42 | 0.14 |
| | | % | 54% | 36% | 62% | 51% | 14% | 45% | 27% | 54% | 42% | 14% |
| 4 | h | RL | 1.17 | 1.08 | 1.03 | 1.09 | 0.07 | 1.07 | 1.03 | 1.04 | 1.05 | 0.02 |
| | | % | 17% | 7% | 3% | 9% | 7% | 7% | 3% | 4% | 5% | 2% |
| 5 | h | RL | 1.69 | 1.61 | 1.29 | 1.53 | 0.21 | 1.43 | 1.21 | 1.32 | 1.32 | 0.11 |
| | | % | 69% | 59% | 29% | 52% | 21% | 43% | 21% | 32% | 32% | 11% |
| 6 | h | RL | 2.04 | 2.14 | 2.26 | 2.15 | 0.11 | 1.62 | 1.51 | 1.57 | 1.57 | 0.06 |
| | | % | 104% | 112% | 126% | 114% | 11% | 62% | 51% | 57% | 57% | 6% |
| 6.5 | h | RL | 2.18 | 2.36 | 2.14 | 2.23 | 0.12 | 1.87 | 1.78 | 1.83 | 1.83 | 0.05 |
| | | % | 118% | 134% | 114% | 122% | 10% | 87% | 78% | 83% | 83% | 5% |
| 7 | h | RL | 2.12 | 2.52 | 2.30 | 2.31 | 0.20 | 1.93 | 1.89 | 1.86 | 1.89 | 0.04 |
| | | % | 112% | 150% | 130% | 131% | 19% | 93% | 89% | 86% | 89% | 4% |
| 7.5 | h | RL | 2.17 | 2.35 | 2.21 | 2.24 | 0.09 | 1.74 | 1.67 | 1.68 | 1.70 | 0.04 |
| | | % | 117% | 133% | 121% | 124% | 8% | 74% | 67% | 68% | 70% | 4% |
| 8 | h | RL | 2.18 | 2.30 | 2.17 | 2.22 | 0.07 | 1.52 | 1.45 | 1.55 | 1.51 | 0.05 |
| | | % | 118% | 128% | 117% | 121% | 6% | 52% | 45% | 55% | 51% | 5% |

TABLE 31
AHR results, 0.5 mg/kg dose level

| | BU Carbachol to Produce PC400 | |
|---|---|---|
| Sheep # | 24 h pre-ascaris | 24 h post Ascaris |

Control Trial

| | | |
|---|---|---|
| 2489 | 24 | 13 |
| 2497 | 31 | 13 |
| 2520 | 26 | 13 |

Drug Trial: Day 22

| | | |
|---|---|---|
| 2489 | 26 | 25 |
| 2497 | 26 | 24 |
| 2520 | 27 | 25 |

TABLE 32
AHR results, 0.25 mg/kg dose level

| | BU Carbachol to Produce PC400 | |
|---|---|---|
| Sheep # | 24 h pre-ascaris | 24 h post Ascaris |

Control Trial

| | | |
|---|---|---|
| 2457 | 10 | 6 |
| 2517 | 28 | 13 |
| 2539 | 13 | 6 |

Drug Trial: Day 22

| | | |
|---|---|---|
| 2457 | 13 | 11 |
| 2517 | 26 | 25 |
| 2539 | 14 | 13 |

[0433] As shown in Table 29, treatment with AC000482 at 0.5 mg/kg dose level resulted in minimal attenuation of AR but robust attenuation of LR upon challenge on day 22. For example, untreated sheep display a mean LR increase of 125% in R_{L} at 6.5 h compared to baseline, where AC000482 treated sheep on day 22 challenge show a more attenuated LR increase of 69% in R_{L} at 6.5 h compared to baseline. In addition, 24 h after the day 22 ascaris challenge all AC000482 treated sheep showed no signs of ascaris induced airway hyperresponsiveness, as shown by similar number of carbachol breath units required to produce PC₄₀₀. In contrast, in the control trial without AC000482 treatment, sheep required approximately half the amount of carbachol breath units to induce PC₄₀₀ post-ascaris challenge, signifying airway hyperresponsiveness.

[0434] As shown in Table 30, treatment with AC000482 at 0.25 mg/kg dose level resulted in minimal attenuation of AR but robust attenuation of LR upon challenge on day 22. For example, untreated sheep display a mean LR increase of 122% in R_{L} at 6.5 h compared to baseline, where AC000482 treated sheep on day 22 challenge show a more attenuated LR increase of 83% in R_{L} at 6.5 h compared to baseline. In addition, 24 h after the day 22 ascaris challenge all AC000482 treated sheep showed no signs of ascaris induced airway hyperresponsiveness, as shown by similar number of carbachol breath units required to produce PC₄₀₀. In contrast, in the control trial without AC000482 treatment, sheep required approximately half the amount of carbachol breath units to induce PC₄₀₀ post-ascaris challenge, signifying airway hyperresponsiveness.

[0435] Collectively, the results demonstrate dose-responsive impacts of AC000482 treatment on airway mechanics following ascaris challenge. The results show that even at the lowest dose of AC000482, the impact on the late phase response is still substantial enough to block airway hyperresponsiveness 24 h post challenge.

### Example 13. Aerosolized Administration of MUC5AC RNAi Agents in Sheep

[0436] The sheep model of allergic asthma airway inflammation described in example 10, above, was used. Six (6) ascaris sensitive sheep with previously established responses to Ascaris suum challenge were administered, on days 1, 8 and 15, with either 1.0 mg/kg pulmonary deposited dose levels of AC000480 or 1.0 mg/kg pulmonary deposited dose of a negative control siRNA conjugate that included the same targeting ligand but is unable to load into the RISC complex and therefore is unable to mediate RNA interference gene silencing. On day 21, AHR was assessed by determining the cumulative carbachol concentration (in breath units, BU) that increased R_{L} to 400% over the post-1×PBS value (PC₄₀₀). On day 22, sheep were challenged with Ascaris suum extract, and R_{L} was monitored out to 8 h post-challenge. On day 23, AHR was again assessed as on day 21. Sheep dosed with AC000480 attenuated allergen-induced late-phase reaction and airway hyperresponsiveness in a dose dependent manner, while similar exposure of the negative control conjugate did not attenuate allergen-induced changes in airway mechanics.

### Other Embodiments

[0437] It is to be understood that while the invention has been described in conjunction with the detailed description thereof, the foregoing description is intended to illustrate and not limit the scope of the invention, which is defined by the scope of the appended claims. Other aspects, advantages, and modifications are within the scope of the following claims.

1. An RNAi agent for inhibiting expression of a Mucin 5AC gene, comprising:
an antisense strand comprising at least 17 contiguous nucleotides differing by 0 or 1 nucleotides from any one of the sequences provided in Table 2 or Table 3; and
a sense strand comprising a nucleotide sequence that is at least partially complementary to the antisense strand.

2.-3. (canceled)

4. The RNAi agent of claim 1, wherein at least one nucleotide of the RNAi agent is a modified nucleotide or includes a modified internucleoside linkage.

5. (canceled)

6. The RNAi agent of claim 4, wherein the modified nucleotide is selected from the group consisting of: 2′-O-methyl nucleotide, 2′-fluoro nucleotide, 2′-deoxy nucleotide, 2′,3′-seco nucleotide mimic, locked nucleotide, 2′-F-arabino nucleotide, 2′-methoxyethyl nucleotide, abasic nucleotide, ribitol, inverted nucleotide, inverted 2′-O-methyl nucleotide, inverted 2′-deoxy nucleotide, 2′-amino-modified nucleotide, 2′-alkyl-modified nucleotide, morpholino nucleotide, vinyl phosphonate-containing nucleotide, cyclopropyl phosphonate-containing nucleotide, and 3′-O-methyl nucleotide.

7.-12. (canceled)

13. The RNAi agent of claim 1, wherein the sense strand and the antisense strand are each between 18 and 24 nucleotides in length.

14. The RNAi agent of claim 13, wherein the sense strand and the antisense strand are each 21 nucleotides in length.

15.-16. (canceled)

17. The RNAi agent of claim 1, wherein the sense strand comprises one or two inverted abasic residues.

18.-19. (canceled)

20. The RNAi agent of claim 1, wherein the antisense strand consists of, consists essentially of, or comprises a nucleotide sequence that differs by 0 or 1 nucleotides from one of the following nucleotide sequences 5′→3′):
(SEQ ID NO: 79)
UUGUAGUAGUCGCAGAACA;
or
(SEQ ID NO: 83)
UUCUUGUUCAGGCAAAUCA.

21. The RNAi agent of claim 1, wherein the antisense strand consists of, consists essentially of, or comprises a nucleotide sequence that differs by 0 or 1 nucleotides from one of the following nucleotide sequences (5′→3′):
(SEQ ID NO: 1525)
UUGUAGUAGUCGCAGAACAGC.

22. The RNAi agent of claim 1, wherein the sense strand consists of, consists essentially of, or comprises a nucleotide sequence that differs by 0 or 1 nucleotides from one of the following nucleotide sequences (5′→3′):
(SEQ ID NO: 568)
UGUUCUGCGACUACUACAA.

23. (canceled)

24. The RNAi agent of claim 1, wherein the antisense strand comprises, consists of, or consists essentially of a modified nucleotide sequence that differs by 0 or 1 nucleotides from one of the following nucleotide sequences (5′→3′):
(SEQ ID NO: 1127)
cPrpusUfsgsUfaGfuAfgUfcGfcAfgAfaCfaGfsc;
(SEQ ID NO: 1065)
usUfsgsUfaGfuAfgUfcGfcAfgAfaCfaGfsc;
wherein a, c, g, and u represent 2′-O-methyl adenosine, 2′-O-methyl cytidine, 2′-O-methyl guanosine, and 2′-O-methyl uridine, respectively; Af, Cf, Gf, and Uf represent 2′-fluoro adenosine, 2′-fluoro cytidine, 2′-fluoro guanosine, and 2′-fluoro uridine, respectively; cPrpu represents a 5′-cyclopropyl phosphonate-2′-O-methyl uridine; s represents a phosphorothioate linkage; and wherein all or substantially all of the nucleotides on the sense strand are modified nucleotides.

25. The RNAi agent of claim 1, wherein the sense strand comprises, consists of, or consists essentially of a modified nucleotide sequence that differs by 0 or 1 nucleotides from one of the following nucleotide sequences (5′→3′):
(SEQ ID NO: 1265)
gscuguucuGfCfGfacuacuacaa;
wherein a, c, g, and u represent 2′-O-methyl adenosine, 2′-O-methyl cytidine, 2′-O-methyl guanosine, and 2′-O-methyl uridine, respectively; Af, Cf, Gf, and Uf represent 2′-fluoro adenosine, 2′-fluoro cytidine, 2′-fluoro guanosine, and 2′-fluoro uridine, respectively; and s represents a phosphorothioate linkage; and wherein all or substantially all of the nucleotides on the antisense strand are modified nucleotides.

26. (canceled)

27. The RNAi agent of claim 1, wherein the RNAi agent is linked to a targeting ligand.

28.-30. (canceled)

31. The RNAi agent of claim 27, wherein the targeting ligand comprises the structure: [chemical structure]
or a pharmaceutically acceptable salt thereof, or [chemical structure]
or a pharmaceutically acceptable salt thereof, wherein [symbol] indicates the point of connection to the RNAi agent.

32. The RNAi agent of claim 27, wherein RNAi agent is conjugated to a targeting ligand having the following structure: [chemical structure]
or a pharmaceutically acceptable salt thereof, wherein [symbol] indicates the point of connection to the RNAi agent.

33. (canceled)

34. The RNAi agent of claim 27, wherein the targeting ligand is conjugated to the sense strand.

35. (canceled)

36. A composition comprising the RNAi agent of claim 1, wherein the composition further comprises a pharmaceutically acceptable excipient.

37. The composition of claim 36, further comprising a second RNAi agent capable of inhibiting the expression of Mucin 5AC gene expression.

38.-40. (canceled)

41. The composition of claim 36, wherein the RNAi agent is a sodium salt.

42.-47. (canceled)

48. A method of treating one or more symptoms or diseases associated with MUC5AC protein levels, the method comprising administering to a human subject in need thereof a therapeutically effective amount of the composition of claim 36.

49.-62. (canceled)

63. A method of making an RNAi agent of claim 1, comprising annealing a sense strand and an antisense strand to form a double-stranded ribonucleic acid molecule.

64.-65. (canceled)

The application's sequence listing, which the Patent Office published only in electronic form, follows.

SEQUENCE LISTING (1718 sequences)

SEQ ID NO: 1 - RNA, 17448 nt, Homo sapiens
  source 1..17448: mol_type = mRNA
ctcagaggctgctgagggacagggcactcttccccgccgtccacacaatgagtgttggccggaggaagctggccctgctctgggccctggctctcgctctggcctgcacccggcatacaggccatgcccaggatggctcctccgaatccagctacaagcaccaccctgccctctctcctatcgcccgggggcccagcggggtcccgctccgtggggcgactgtcttcccatctctgaggaccatccctgtggtacgagcctccaacccggcgcacaacgggcgggtgtgcagcacctggggcagcttccactacaagaccttcgacggcgacgtcttccgcttccccggcctctgcaactacgtgttctccgagcactgcggtgccgcctacgaggattttaacatccagctacgccgcagccaggagtcagcggcccccacgctgagcagggtcctcatgaaggtggatggcgtggtcatccagctgaccaagggctccgtcctggtcaacggccacccggtcctgctgcccttcagccagtctggggtcctcattcagcagagcagcagctacaccaaggtggaggccaggctgggccttgtcctcatgtggaaccacgatgacagcctgctgctggagctggacaccaaatacgccaacaagacctgtgggctctgtggggacttcaacgggatgcccgtggtcagcgagctcctctcccacaacaccaagctgacacccatggaattcgggaacctgcagaagatggacgaccccacggaccagtgtcaggaccctgtccctgaacccccgaggaactgctccactggctttggcatctgtgaggagctcctgcacggccagctgttctctggctgcgtggccctggtggacgtcggcagctacctggaggcttgcaggcaagacctctgcttctgtgaagacaccgacctgctcagctgcgtctgccacacccttgccgagtactcccggcagtgcacccatgcaggggggttgccccaggactggcggggccctgacttctgcccccagaagtgccccaacaacatgcagtaccacgagtgccgctccccctgcgcagacacctgctccaaccaggagcactcccgggcctgtgaggaccactgtgtggccggctgcttctgccctgaggggacggtgcttgacgacatcggccagaccggctgtgtccctgtgtcaaagtgtgcctgcgtctacaacggggctgcctatgccccaggggccacctactccacagactgcaccaactgcacctgctccggaggccggtggagctgccaggaggttccatgcccgggtacctgctctgtgcttggaggtgcccacttctcaacgtttgacgggaagcaatacacggtgcacggcgactgcagctatgtgctgaccaagccctgtgacagcagtgccttcactgtactggctgagctgcgcaggtgcgggctgacggacagcgagacctgcctgaagagcgtgacactgagcctggatggggcgcagacggtggtggtgatcaaggccagtggggaagtgttcctgaaccagatctacacccagctgcccatctctgcagccaacgtcaccatcttcagaccctcaaccttcttcatcatcgcccagaccagcctgggcctgcagctgaacctgcagctggtgcccaccatgcagctgttcatgcagctggcgcccaagctccgtgggcagacctgcggtctctgtgggaacttcaacagcatccaggccgatgacttccggaccctcagtggggtggtggaggccaccgctgcggccttcttcaacaccttcaagacccaggccgcctgccccaacatcaggaacagcttcgaggacccctgctctctgagcgtggagaatgagaagtatgctcagcactggtgctcgcagctgaccgatgccgacggccccttcggccggtgccatgctgccgtgaagccgggaacctactactcgaactgcatgtttgacacctgcaactgtgagcggagcgaggactgcctgtgcgccgcgctgtcctcctacgtgcacgcctgtgccgccaagggcgtgcagctcggcggctggagggacggcgtctgcacgaagcctatgaccacttgccccaagtcaatgacgtaccactaccatgtcagcacctgccagcccacctgccgctccctgagcgagggggacatcacctgcagtgttggcttcatccccgtggatggctgcatctgtcccaagggcaccttcctggacgacacgggcaagtgtgtgcaggccagcaactgtccctgctaccacagaggctccatgatccccaatggggagtcggtgcacgacagcggggctatctgcacctgcacacatgggaagctgagctgcatcggaggccaagcccccgccccagtgtgtgctgcgcccatggtgttctttgactgccgaaatgccacgcccggggacacaggggctggctgtcagaagagctgccacacactggacatgacctgttacagcccccagtgtgtgcctggctgcgtgtgccccgacgggctggtggcggacggcgagggcggctgcatcactgcggaggactgcccctgcgtgcacaatgaggccagctaccgggccggccagaccatccgggtgggctgcaacacctgcacctgtgacagcaggatgtggcggtgcacagatgacccctgcctggccacctgcgccgtgtacggggacggccactacctcaccttcgacggacagagctacagcttcaacggagactgcgagtacacgctggtgcagaaccactgtggcgggaaagacagcacccaggactcctttcgtgttgtcaccgagaacgtcccctgcggcaccacagggaccacctgctccaaggccatcaagattttcctggggggcttcgagctgaagctaagccatgggaaggtggaggtgatcgggacggacgagagccaggaggtgccatacaccatccggcagatgggcatctacctggtggtggacaccgacattggcctggtgctgctgtgggacaagaagaccagcatcttcatcaacctcagccccgagttcaagggcagggtctgcggcctgtgtgggaacttcgacgacatcgccgttaatgactttgccacgcggagccggtctgtggtgggggacgtgctggagtttgggaacagctggaagctctccccctcctgcccagatgccctggcgcccaaggacccctgcacggccaaccccttccgcaagtcctgggcccagaagcagtgcagcatcctccacggccccaccttcgccgcctgccacgcacacgtggagccggccaggtactacgaggcctgcgtgaacgacgcgtgcgcctgcgactccgggggtgactgcgagtgcttctgcacggctgtggccgcctacgcccaggcctgccatgaagtaggcctgtgtgtgtcctggcggaccccgagcatctgccctctgttctgcgactactacaaccccgaaggccagtgcgagtggcactaccagccctgcggggtgccctgcctgcgcacctgccggaacccccgtggagactgcctgcgggacgtccggggcctggaaggctgctaccccaagtgcccaccagaggctcccatctttgatgaggacaagatgcagtgtgtggccacctgcccaaccccgcctctgccaccacggtgccacgtccatgggaagtcctaccggccaggtgcagtggtgccctcggacaagaactgccagtcctgcctttgtacggagcgcggcgtggagtgcacctacaaagctgaggcctgtgtctgcacctacaatggacagcgcttccacccaggggacgtcatctaccacacgacggatggcacgggtggctgcatctccgcccgctgcggggccaacggcaccattgagaggagggtctacccctgcagccccaccacccctgtccccccaaccaccttctccttctccacacccccgcttgtcgtgagctccacgcacacccccagcaatggcccaagcagcgcgcacacaggccctccgagcagcgcctggcccaccacagcaggcacttctcccaggacgaggctgcccacagcctctgcctcactgccgccggtctgtggggaaaagtgcctgtggtcgccatggatggatgtcagccgccctggacggggcacggacagcggtgacttcgacacactggagaacctccgcgcccatgggtaccgggtgtgcgaatcacccaggtcggtggagtgccgagctgaggacgcccccggagtgccgctccgagccctggggcagcgtgtgcagtgcagcccggatgtggggctgacctgtcgtaacagggagcaggcatcggggctctgctacaactaccagatcagggtccagtgctgcacgcccctaccctgctccacctctagcagtccagcccagaccactcctccaactacctccaagaccactgaaacccgggcctcaggctcctcagctcccagcagcacacctggcaccgtgtctctctctacagccaggacgacacctgccccaggtaccgctacctctgtcaaaaaaactttctcaactcccagccctccgccagtgccggcaacatcaacatcatccatgtcgaccacggccccggggacctctgtggtctccagcaagcccacccccacggagcccagcacatcctcctgcctgcaggagctttgcacctggaccgagtggatcgatggcagctaccctgctcctggaataaatggtggagattttgacacatttcaaaatttgagagacgaaggatacacattctgtgaaagtcctcgaagcgtgcagtgccgggcagagagcttccccaacacgccgctggcagacctggggcaggacgtcatctgcagccacacagaggggctgatttgcctgaacaagaaccagctcccacccatctgctacaactatgagatccgcatccagtgttgcgagacggtgaacgtgtgcagagacatcaccagactgccaaagaccgtcgcaacgacacggccgactccacatccaaccggagctcagacccagaccaccttcaccacacacatgccctcggcctccacagagcaacccacggcaacctccaggggtgggcccacagcaaccagcgtcacacagggcacccacaccacactagtcaccagaaactgtcatccccggtgcacctggacaaagtggttcgacgtggacttcccgtcccccggaccccatggtggagacaaggaaacctacaacaacatcatcaggagtggggaaaaaatctgccgccgacctgaggagatcaccaggctccagtgccgagccaagagccacccagaggtgagcatcgaacacctgggccaggtggtgcagtgcagccgggaagagggcctggtgtgccggaaccaggaccagcagggacccttcaagatgtgcctcaactacgaggtgcgtgtgctctgctgcgagacccccagaggctgccacatgacctccacacctggctccacctctagcagtccagcccagaccactccttcaacaacctccaagaccactgaaacccaggcctcaggctcctcagcccccagcagcacacctggcaccgtgtctctctctacagccaggacgacacctgccccaggtaccgctacctctgtcaaaaaaactttctcaactcccagccctccgccagtgccggcaacatcaacatcatccatgtcgaccacggccccggggacctctgtggtctccagcaagcccacccccacggagcccagcacatcctcctgcctgcaggagctttgcacctggaccgagtggattgatggcagctaccctgctcctggaataaatggtggagattttgacacatttcaaaatttgagagacgaaggatacacattctgtgaaagtcctcgaagcgtgcagtgccgggcagagagcttccccaacacgccgctggcagacctggggcaggacgtcatctgcagccacacagaggggctgatttgcctgaacaagaaccagctcccacccatctgctacaactatgagatccgcatccagtgttgcgagacggtgaacgtgtgcagagacatcaccagaccgccaaagaccgtcgcaacgacacggccgactccacatccaaccggagctcagacccagaccaccttcaccacacacatgccctcggcctccacagagcaacccacggcaacctccaggggtgggcccacagcaaccagcgtcacacagggcacccacaccacaccagtcaccagaaactgtcatccccggtgcacctggacaacgtggttcgacgtggacttcccgtcccccggaccccatggtggagacaaggaaacctacaacaacatcatcaggagtggggaaaaaatctgccgccgacctgaggagatcaccaggctccagtgccgagccaagagccacccagaggtgagcatcgaacacctgggccaggtggtgcagtgcagccgggaagagggcctggtgtgccggaaccaggaccagcagggacccttcaagatgtgcctcaactacgaggtgcgtgtgctctgctgcgagacccccaaaggctgccccgtgacctccacacctgtgacagctcctagcacccctagtgggagagccaccagcccaactcagagcacctcctcttggcagaaatccaggacaaccactttggtgacaaccagcacaacctccactccacagaccagtacaacctatgcccatacaaccagcacaacctctgctcctacagccagaacaacctctgctcctacaaccagaacaacctctgcctctccagccagcacaacctctggtcctggaaatactcccagccctgttcctaccaccagcacaatctctgctcctacaactagcataacctctgcccctacaaccagcacaacctctgcccctacaagcagcacaacctctggtcctggaactactcccagccctgttcctaccaccagcataacctctgcccctacaaccagcacaacctctgctcctacaaccagcacaacctctgcccgtacaagcagcacaacctctgccactaccaccagcagaatctctggtcctgaaactactcccagccctgttcctaccaccagcacaacctctgccactacaaccagcacaacctcagctcctacaaccagcacaacctctgcccctacaagcagcacaacctccagtccacagaccagcacaacctcggctcctacaaccagcacaacttctggtcctggaactaccccaagccctgttcccacgaccagcacaacctctgcccctacaacaagaacaacttctgctcctaaaagcagcacaacctctgccgctacaaccagcacaacctctggtcctgaaactactcctagacctgttcctaccaccagcacaacctcttctcctacaaccagcacaacctctgctcctacaaccagcacaacctctgcttctacaaccagcacaacctctggtgctggaactactcccagccctgttcccaccaccagcacaacctctgctcctacaaccagcacaacctctgcccctataagcagcacaacctctgccactacaaccagcacaacctctggtcctggaactactcccagccctgttcctaccacgagcacaacctctgctcctacaaccagcacaacctctggtcctggaactactcccagtgctgttcccaccaccagcataacctctgcacctacaaccagcacaaactctgcccctataagcagcacaacctctgccactacaaccagcagaatctctggtcctgaaactactcccagccctgttcctaccgccagcacaacctctgcttctacaactagcacaacctctggtcctggaactactcccagccctgttcctaccaccagcacaatctctgttcctaccaccagcacaacttctgcttctacaaccagcacaacctctgcttctacaaccagcacaacctctggtcctggaactactcccagccctgttcccaccaccagcacaacctctgctcccacaacaagcacaacctctgcccctacaaccagcacaatctcggccccaacaaccagcacaacctctgccactacaaccagcacgacctctgctcctacacccagaagaacctcagcccctacaaccagcacaatctctgcctctaccaccagcacaacctctgcgactacaaccagcacaacctctgctactacaaccagcacaatctctgcccctacaaccagcacaactttgtctcctacaaccagcacaacctctactactataaccagcacaacttctgcccctataagcagcacaacttccacaccacagaccagcacaacttcggctcctacaaccagcacaacttctggtcctggaactacttcaagccctgttcccaccaccagcacaacctctgcccctacaaccagcacaacctctgcccctacaaccagaacaacctctgtccctacaagcagcacaacctccactgctacaaccagcacaacctctggccctggaactactcccagccctgttcccaccaccagtacaacctctgctcctacaaccagaacaacctctgctcctacaaccagcacaacctctgcccctacaaccagcacaacctctgcccctacaagcagcacaacctcagctactacaaccagcacaatctctgttcctacaaccagcacaacttctgttcctggaactactcccagccctgttcctaccaccagcacaatctctgttcctaccaccagcacaacttctgcttctacaaccagcacaacctctggtcctggaactactcccagccctgttcccaccaccagcacaacctctgctcccacaacaagcacaacctctgcccctacaaccagcacaatctcggccccaacaaccagcacaccctctgcccctacaaccagcacaaccttagctcctacaaccagcacaacctctgcccctacaaccagcacaacctctacccctacaagcagcacaacctcctctccacagaccagcacaacctcggcttctaccaccagcataacttctggtcctggaactaccccaagccctgttcccaccaccagcacaacctctgctcctacaaccagcacaacctctgccgctacaaccagcacaatctcggccccaacaaccagcacaacgtctgctcctacaaccagcacaacctctgcctctacagccagcaaaacctctggtcttggaactactcccagccctattcctaccaccagcacaacctctcctcctacaaccagcacaacttctgcctctacagccagcaaaacctctggtcctggaaccactcccagccctgttcccaccaccagcacaatctttgctcctagaaccagcaccacttctgcctctacaaccagcacaacccctggtcctggaaccactcccagccccgttcccaccaccagcacagcctctgtttcaaagaccagcacaagccatgtttccatatccaagacaacccactcccaaccagtcaccagagactgtcatctccggtgcacctggaccaagtggtttgacatagacttcccatcccctggaccccacggcggggacaaggaaacctacaacaacatcatcaggagtggggaaaaaatctgccgccgacctgaggagatcaccaggctccagtgccgagccgagagccacccggaggtgagcattgaacacctgggccaggtggtgcagtgcagccgtgaagagggcctggtgtgccggaaccaggaccagcagggacccttcaagatgtgcctcaactacgaggtgcgtgtgctctgctgcgagacccctaaaggttgccccgtgacctccacacctgtgacagctcctagcacccctagtgggagagccaccagcccaactcagagcacttcctcttggcagaaatccaggacaaccactttggtgacaaccagcacaacctccactccacagaccagcacaacctctgctcctacaaccagcacaacctctgctcccacaaccagcacaacttctgcccctacaaccagcacaacctccactccacagaccagcatatcctctgcccctacaagcagcacaacctcggctcctacaagcagcacaatctctgctcgtacaaccagcataatctctgcccctacaaccagcacaacctcttcccctacaaccagcacaacctctgctactacaaccagcacaacctctgcccctacaagcagcacaacctccactccacagaccagcaaaacctcagctgctacaagcagcacaacctccggttctggaactactcccagccctgttaccaccaccagcacagcctctgtttcaaagaccagcacaagccatgtttctgtatccaagacaacccactcccaaccagtcaccagagactgtcatccccggtgcacctggaccaaatggtttgatgtggactttccatcccctggaccccacggtggggacaaggaaacctacaacaacatcatcaggagtggggaaaaaatctgccgccgacctgaggagatcaccaggctccagtgccgagccaagagccacccggaggtgagcatcgaacacctgggccaggtggtgcagtgcagccgcgaagagggcctggtgtgccggaaccaggaccagcagggacccttcaagatgtgcctcaactacgaggtgcgtgtgctttgctgcgagacccccaaaggctgccccgtgacctccacatctgtgacagctcctagcacccctagtgggagagccaccagcccaactcagagcacctcctcttggcagaaatccaggacaaccactttggtgacaagcagcataacctccactacacagaccagcacaacctctgcccctacaactagcacaacccctgcttctatacccagcacaacctctgccccaacaaccagcacaacctctgctcccacaacgagcacaacttctgcccctacaaccagcacaacctccactccacagaccaccacatcctctgcccctacaagcagcacaacctcggctcctaccaccagcacaatctctgcccctacaaccagcacaatctctgcccctacaaccagcacaacctctgctcccacagccagcacaacgtcagctcctacgagcacttcctcggctcctacaaccaacacaacctctgcccctacaactagcactacctctgctcccataaccagcacaatctctgcccctacaaccagcacaacctccactccacagaccagcacaatctcttcccctacaaccagcacaacctccactccgcagaccagcacaacctcttcccctacaactagcacaacctcagctcctacaaccagcacaacttctgcccctacaaccagcacaacctccactccacagaccagcatatcctctgcccctacaagcagcacaacctctgctcctacagccagcacaatctctgcccctacaaccagcacaacctctttccatacaaccagcacaacctctccccctacaagcagcacaagctccactccacagaccagcaaaacctcagctgctacaagcagcacaacctccggttctggaactactcccagccccgttcccaccaccagcacagcctctgtttcaaagaccagcacaagccatgtttctgtatccaagacaacccactcccaaccagtcaccagagactgtcatccccggtgcacctggaccaagtggtttgacgtggactttccatcccctggaccccacggtggggacaaggaaacctacaacaacatcatcaggagtggggaaaaaatctgccgccgacctgaggagatcaccaggctccagtgccgagccgagagccacccggaggtgagcatcgaacacctgggccaggtggtgcagtgcagccgggaagagggcctggtgtgccggaaccaggaccagcagggacccttcaagatgtgcctcaactacgaggtgcgtgtgctctgctgcgagacccccaaaggctgccccgtgacctccacacctgtgacagctcctagcacccctagtgggagagccaccagcccaactcagagcacttcctcttggcagaaatccaggacaaccactttggtgacaaccagcacaacctccactccacagaccagcacaacctctgcccctacaaccagcacaatccctgcttctacacccagcacaacctctgcccctacaaccagcacaacctctgcccctacaaccagcacgacctcagctcctacacacagaacgacttctggtcctacaaccagcacaaccttggctcctacaaccagcacaacctctgctccaacaaccagcacaaactctgctcctacaaccagcacaatctctgcctctacaaccagcacaatctctgcccctacaaccagcacaatctcttcccctacaagcagcacaacctccactccacagaccagcaaaacctcagctgctacaagcagcacaacctccggttctggaactactccaagccctgttcccaccaccagcacaacctctgcctctacaaccagcacaacttctgctcctacaaccagcacaacctctggtcctggaactactccaagccctgttcccagcaccagtacaacctctgctgctacaaccagcacaacctctgctcctacaaccagaacaacatctgctcctacaagcagcatgacctctggtcctggaactactcccagccctgttcccaccaccagcacaacctctgctcctacaactagcacaacctctggtcctggaactactcccagccctgttcccaccaccagcacaacctctgctcctataaccagcacaacctctggtcctggaagtactcccagccctgttcccaccaccagcacaacctctgctcctacaaccagcacaacctctgcctctacagccagcacaacctctggtcctggaactactcccagccctgttcccaccaccagcacaacctctgctcctacaaccagaacaacctctgcctctacagccagcacaacctctggtcctggaagtactcccagccctgttcccaccaccagcacaacctctgctcctacaaccagaacaacccctgcctctacagccagcacaacctctggtcctggaactactcccagccctgttcccaccacaagcacaacctctgcttctacaaccagcacaatctctctccctacaaccagcacaacctctgctcctataaccagcatgacctctggtcctggaactactcccagccctgttcccaccaccagcacaacctctgctcctacaaccagcacaacctctgcctctacagccagcacaacctctggtcctggaactactcccagccctgttcccaccaccagcacaacctctgctcctacaaccagcacaacctctgcctctacagccagcacaacctctggtcctggaacttctctcagccctgttcccaccacgagcacaacctctgctcctacaactagcacaacctctggtcctggaactactcccagccctgttcccaccaccagcacaacctctgctcctacaaccagcacgacctctggtcctggaactactcccagccccgttcccaccaccagcacaacccctgtttcaaagaccagcacaagccatctttctgtatccaagacaacccactcccaaccagtcaccagtgactgtcatcctctgtgcgcctggacaaagtggttcgacgtggacttcccatcccctggaccccacggcggggacaaggaaacctacaacaacatcatcaggagtggggaaaaaatctgccgccgacctgaggagatcaccaggctccagtgccgagccgagagccacccggaggtgaacattgaacacctgggtcaggtggtgcagtgcagccgtgaagagggcctggtgtgccggaaccaggaccagcagggacccttcaagatgtgcctcaactacgaggtgcgcgtgctctgctgcgagacccccagaggctgcccggtgacctctgtgaccccatatgggacttctcctaccaatgctctgtatccttccctgtctacttccatggtatccgcctccgtggcatccacctctgtggcatccagctctgtggcatccagctctgtggcttactccacccaaacctgcttctgcaacgtggctgaccggctctaccctgcaggatccaccatataccgccacagagacctcgctggccattgctattatgccctgtgtagccaggactgccaagtggtcagaggggttgacagtgactgtccgtccaccacgctgcctcctgccccagccacgtccccttcaatatccacctccgagcccgtcactgagctgggatgcccaaatgcggttccccccagaaagaaaggtgagacctgggccacacccaactgctccgaggccacctgtgagggcaacaacgtcatctccctgcgcccgcgcacgtgcccgagggtggagaagcccacttgtgccaacggctacccggctgtgaaggtggctgaccaagatggctgctgccatcactaccagtgccagtgtgtgtgcagcggctggggtgacccccactacatcaccttcgacggcacctactacaccttcctggacaactgcacgtacgtgctggtgcagcagattgtgcccgtgtatggccacttccgcgtgctcgtcgacaactacttctgcggtgcggaggacgggctctcctgcccgaggtccatcatcctggagtaccaccaggaccgcgtggtgctgacccgcaagccagtccacggggtgatgacaaacgagatcatcttcaacaacaaggtggtcagccccggcttccggaaaaacggcatcgtggtctcgcgcatcggcgtcaagatgtacgcgaccatcccggagctgggagtccaggtcatgttctccggcctcatcttctccgtggaggtgcccttcagcaagtttgccaacaacaccgagggccagtgcggcacttgcaccaacgacaggaaggatgagtgccgcacgcctagggggacggtggtcgcttcctgctccgagatgtccggcctctggaacgtgagcatacccgaccagccagcctgccaccggcctcacccgacgcccaccacggtcgggcccaccacagttgggtctaccacggtcgggcccaccacagttgggtctaccacggtcgggcccaccacaccgcctgctccgtgcctgccatcacccatctgccagctgattctgagcaaggtctttgagccgtgccacactgtgatccccccactgctgttctatgagggctgcgtctttgaccggtgccacatgacggacctggatgtggtgtgctccagcctggagctgtacgcggcactctgtgcgtcccacgacatctgcatcgattggagaggccggaccggccacatgtgcccattcacctgcccagccgacaaggtgtaccagccctgcggcccgagcaacccctcctactgctacgggaatgacagcgccagcctcggggctctgccggaggccggccccatcaccgaaggctgcttctgtccggagggcatgaccctcttcagcaccagtgcccaagtctgcgtgcccacgggctgccccaggtgtctggggccccacggagagccggtgaaggtgggccacaccgtcggcatggactgccaggagtgcacgtgtgaggcggccacgtggacgctgacctgccgacccaagctctgcccgctgccccctgcctgccccctgcccggcttcgtgcctgtgcctgcagccccacaggccggccagtgctgcccccagtacagctgcgcctgcaacaccagccgctgccccgcgcccgtgggctgtcctgagggcgcccgcgcgatcccgacctaccaggagggggcctgctgcccagtccaaaactgcagctggacagtgtgcagcatcaacgggaccctgtaccagcccggcgccgtggtctcctcgagcctgtgcgaaacctgcaggtgtgagctgccgggtggccccccatcggacgcgtttgtggtcagctgtgagacccagatctgcaacacacactgccctgtgggcttcgagtaccaggagcagagcgggcagtgctgtggcacctgtgtgcaggtcgcctgtgtcaccaacaccagcaagagccccgcccacctcttctaccccggcgagacctggtcagacgcagggaaccactgtgtgacccaccagtgtgagaagcaccaggatgggctcgtggtggtcaccacgaagaaggcgtgccccccgctcagctgttctctggacgaggcccgcatgagcaaggacggctgctgccgcttctgcccgccgcccccgcccccgtaccagaaccagtcgacctgtgctgtgtaccataggagcctgatcatccagcagcagggctgcagctcctcggagcccgtgcgcctggcttactgccgggggaactgtggggacagctcttccatgtactcgctcgagggcaacacggtggagcacaggtgccagtgctgccaggagctgcggacctcgctgaggaatgtgaccctgcactgcaccgacggctccagccgggccttcagctacaccgaggtggaagagtgcggctgcatgggccggcggtgccctgcgccgggcgacacccagcactcggaggaggcggaacccgagcccagccaggaggcagagagtgggagctgggagagaggcgtcccagtgtcccccatgcactgaccagcactgccgccctcctgacctccaaggagaacctcccatatgtcctctgagctcggcttccaaggccagtggaacttgtgcccctgtccaggcggctgcagctttgaacacactgtccacgcccgctttcttgtggagggtgtgggctatgggtcacctgctgcctggaggaggggcccttacccaccccgcctgcagccacctctcaggaccagccccggggctggccgagctcctctggccatgcatccagcctgctgttctggggacgtgagcatcacctgagggtctcaggaatgacgcttggacatggtgatcagctgcctggtggctgcaggaggaagaacctcactcctacctcagccctcagcctgcgctcccctcctcagtacacggccaatctgttgcataaatacacttgagcattttgcaa

SEQ ID NO: 2 - RNA, 19 nt, synthetic construct
  source 1..19: mol_type = other RNA
gcttccactacaagacctt

SEQ ID NO: 3 - RNA, 19 nt, synthetic construct
  source 1..19: mol_type = other RNA
tgtggaaccacgatgacag

SEQ ID NO: 4 - RNA, 19 nt, synthetic construct
  source 1..19: mol_type = other RNA
gcaagacctctgcttctgt

SEQ ID NO: 5 - RNA, 19 nt, synthetic construct
  source 1..19: mol_type = other RNA
cacagactgcaccaactgc

SEQ ID NO: 6 - RNA, 19 nt, synthetic construct
  source 1..19: mol_type = other RNA
cagtgccttcactgtactg

SEQ ID NO: 7 - RNA, 19 nt, synthetic construct
  source 1..19: mol_type = other RNA
agtgccttcactgtactgc

SEQ ID NO: 8 - RNA, 19 nt, synthetic construct
  source 1..19: mol_type = other RNA
cagcgagacctgcctgaag

SEQ ID NO: 9 - RNA, 19 nt, synthetic construct
  source 1..19: mol_type = other RNA
gggaagtgttcctgaacca

SEQ ID NO: 10 - RNA, 19 nt, synthetic construct
  source 1..19: mol_type = other RNA
aacgtcaccatcttcagac

SEQ ID NO: 11 - RNA, 19 nt, synthetic construct
  source 1..19: mol_type = other RNA
acgtcaccatcttcagacc

SEQ ID NO: 12 - RNA, 19 nt, synthetic construct
  source 1..19: mol_type = other RNA
tgtgggaacttcaacagca

SEQ ID NO: 13 - RNA, 19 nt, synthetic construct
  source 1..19: mol_type = other RNA
gggaacttcaacagcatcc

SEQ ID NO: 14 - RNA, 19 nt, synthetic construct
  source 1..19: mol_type = other RNA
tccaggccgatgacttccg

SEQ ID NO: 15 - RNA, 19 nt, synthetic construct
  source 1..19: mol_type = other RNA
cttcttcaacaccttcaag

SEQ ID NO: 16 - RNA, 19 nt, synthetic construct
  source 1..19: mol_type = other RNA
ttcaacaccttcaagaccc

SEQ ID NO: 17 - RNA, 19 nt, synthetic construct
  source 1..19: mol_type = other RNA
ccaacatcaggaacagctt

SEQ ID NO: 18 - RNA, 19 nt, synthetic construct
  source 1..19: mol_type = other RNA
catcaggaacagcttcgag

SEQ ID NO: 19 - RNA, 19 nt, synthetic construct
  source 1..19: mol_type = other RNA
agtatgctcagcactggtg

SEQ ID NO: 20 - RNA, 19 nt, synthetic construct
  source 1..19: mol_type = other RNA
acctactactcgaactgca

SEQ ID NO: 21 - RNA, 19 nt, synthetic construct
  source 1..19: mol_type = other RNA
tactactcgaactgcatgt

SEQ ID NO: 22 - RNA, 19 nt, synthetic construct
  source 1..19: mol_type = other RNA
acatcacctgcagtgttgg

SEQ ID NO: 23 - RNA, 19 nt, synthetic construct
  source 1..19: mol_type = other RNA
cacctgcagtgttggcttc

SEQ ID NO: 24 - RNA, 19 nt, synthetic construct
  source 1..19: mol_type = other RNA
tggacatgacctgttacag

SEQ ID NO: 25 - RNA, 19 nt, synthetic construct
  source 1..19: mol_type = other RNA
agagctacagcttcaacgg

SEQ ID NO: 26 - RNA, 19 nt, synthetic construct
  source 1..19: mol_type = other RNA
agggaccacctgctccaag

SEQ ID NO: 27 - RNA, 19 nt, synthetic construct
  source 1..19: mol_type = other RNA
ctgctccaaggccatcaag

SEQ ID NO: 28 - RNA, 19 nt, synthetic construct
  source 1..19: mol_type = other RNA
tgctccaaggccatcaaga

SEQ ID NO: 29 - RNA, 19 nt, synthetic construct
  source 1..19: mol_type = other RNA
ctccaaggccatcaagatt

SEQ ID NO: 30 - RNA, 19 nt, synthetic construct
  source 1..19: mol_type = other RNA
gacaagaagaccagcatct

SEQ ID NO: 31 - RNA, 19 nt, synthetic construct
  source 1..19: mol_type = other RNA
agaccagcatcttcatcaa

SEQ ID NO: 32 - RNA, 19 nt, synthetic construct
  source 1..19: mol_type = other RNA
accagcatcttcatcaacc

SEQ ID NO: 33 - RNA, 19 nt, synthetic construct
  source 1..19: mol_type = other RNA
cctcagccccgagttcaag

SEQ ID NO: 34 - RNA, 19 nt, synthetic construct
  source 1..19: mol_type = other RNA
tgggaacttcgacgacatc

SEQ ID NO: 35 - RNA, 19 nt, synthetic construct
  source 1..19: mol_type = other RNA
cagaagcagtgcagcatcc

SEQ ID NO: 36 - RNA, 19 nt, synthetic construct
  source 1..19: mol_type = other RNA
caggcctgccatgaagttt

SEQ ID NO: 37 - RNA, 19 nt, synthetic construct
  source 1..19: mol_type = other RNA
ccctctgttctgcgactac

SEQ ID NO: 38 - RNA, 19 nt, synthetic construct
  source 1..19: mol_type = other RNA
cctctgttctgcgactact

SEQ ID NO: 39 - RNA, 19 nt, synthetic construct
  source 1..19: mol_type = other RNA
tctgttctgcgactactac

SEQ ID NO: 40 - RNA, 19 nt, synthetic construct
  source 1..19: mol_type = other RNA
ctgttctgcgactactaca

SEQ ID NO: 41 - RNA, 19 nt, synthetic construct
  source 1..19: mol_type = other RNA
tgttctgcgactactacaa

SEQ ID NO: 42 - RNA, 19 nt, synthetic construct
  source 1..19: mol_type = other RNA
tctttgatgaggacaagat

SEQ ID NO: 43 - RNA, 19 nt, synthetic construct
  source 1..19: mol_type = other RNA
ctttgatgaggacaagatg

SEQ ID NO: 44 - RNA, 19 nt, synthetic construct
  source 1..19: mol_type = other RNA
tttgatgaggacaagatgc

SEQ ID NO: 45 - RNA, 19 nt, synthetic construct
  source 1..19: mol_type = other RNA
acgtcatctaccacacgac

SEQ ID NO: 46 - RNA, 19 nt, synthetic construct
  source 1..19: mol_type = other RNA
tgctacaactaccagatca

SEQ ID NO: 47 - RNA, 19 nt, synthetic construct
  source 1..19: mol_type = other RNA
tacaactaccagatcaggg

SEQ ID NO: 48 - RNA, 19 nt, synthetic construct
  source 1..19: mol_type = other RNA
ctgatttgcctgaacaaga

SEQ ID NO: 49 - RNA, 19 nt, synthetic construct
  source 1..19: mol_type = other RNA
tgatttgcctgaacaagaa

SEQ ID NO: 50 - RNA, 19 nt, synthetic construct
  source 1..19: mol_type = other RNA
cacccatctgctacaacta

SEQ ID NO: 51 - RNA, 19 nt, synthetic construct
  source 1..19: mol_type = other RNA
acccatctgctacaactat

SEQ ID NO: 52 - RNA, 19 nt, synthetic construct
  source 1..19: mol_type = other RNA
tgctacaactatgagatcc

SEQ ID NO: 53 - RNA, 19 nt, synthetic construct
  source 1..19: mol_type = other RNA
gctacaactatgagatccg

SEQ ID NO: 54 - RNA, 19 nt, synthetic construct
  source 1..19: mol_type = other RNA
gatccgcatccagtgttgc

SEQ ID NO: 55 - RNA, 19 nt, synthetic construct
  source 1..19: mol_type = other RNA
aaagtggttcgacgtggac

SEQ ID NO: 56 - RNA, 19 nt, synthetic construct
  source 1..19: mol_type = other RNA
gtggttcgacgtggacttc

SEQ ID NO: 57 - RNA, 19 nt, synthetic construct
  source 1..19: mol_type = other RNA
ggttcgacgtggacttccc

SEQ ID NO: 58 - RNA, 19 nt, synthetic construct
  source 1..19: mol_type = other RNA
aaggaaacctacaacaaca

SEQ ID NO: 59 - RNA, 19 nt, synthetic construct
  source 1..19: mol_type = other RNA
aggaaacctacaacaacat

SEQ ID NO: 60 - RNA, 19 nt, synthetic construct
  source 1..19: mol_type = other RNA
aaacctacaacaacatcat

SEQ ID NO: 61 - RNA, 19 nt, synthetic construct
  source 1..19: mol_type = other RNA
agaggtgagcatcgaacac

SEQ ID NO: 62 - RNA, 19 nt, synthetic construct
  source 1..19: mol_type = other RNA
gcagggacccttcaagatg

SEQ ID NO: 63 - RNA, 19 nt, synthetic construct
  source 1..19: mol_type = other RNA
agatgtgcctcaactacga

SEQ ID NO: 64 - RNA, 19 nt, synthetic construct
  source 1..19: mol_type = other RNA
atgtgcctcaactacgagg

SEQ ID NO: 65 - RNA, 19 nt, synthetic construct
  source 1..19: mol_type = other RNA
acctcctcttggcagaaat

SEQ ID NO: 66 - RNA, 19 nt, synthetic construct
  source 1..19: mol_type = other RNA
aggacaaccactttggtga

SEQ ID NO: 67 - RNA, 19 nt, synthetic construct
  source 1..19: mol_type = other RNA
ctctgctcctacaactagc

SEQ ID NO: 68 - RNA, 19 nt, synthetic construct
  source 1..19: mol_type = other RNA
acctctgcttctacaacta

SEQ ID NO: 69 - RNA, 19 nt, synthetic construct
  source 1..19: mol_type = other RNA
ataaccagcacaacttctg

SEQ ID NO: 70 - RNA, 19 nt, synthetic construct
  source 1..19: mol_type = other RNA
accagaacaacctctgctc

SEQ ID NO: 71 - RNA, 19 nt, synthetic construct
  source 1..19: mol_type = other RNA
ctacaaccagcacaatctc

SEQ ID NO: 72 - RNA, 19 nt, synthetic construct
  source 1..19: mol_type = other RNA
tggaccaagtggtttgaca

SEQ ID NO: 73 - RNA, 19 nt, synthetic construct
  source 1..19: mol_type = other RNA
acaaccagcacaacttctg

SEQ ID NO: 74 - RNA, 19 nt, synthetic construct
  source 1..19: mol_type = other RNA
caaccactttggtgacaag

SEQ ID NO: 75 - RNA, 19 nt, synthetic construct
  source 1..19: mol_type = other RNA
acaaccaacacaacttctg

SEQ ID NO: 76 - RNA, 19 nt, synthetic construct
  source 1..19: mol_type = other RNA
ctctgctcctacaactagc

SEQ ID NO: 77 - RNA, 19 nt, synthetic construct
  source 1..19: mol_type = other RNA
gagatcatcttcaacaaca

SEQ ID NO: 78 - RNA, 19 nt, synthetic construct
  source 1..19: mol_type = other RNA
agatcatcttcaacaacaa

SEQ ID NO: 79 - RNA, 19 nt, synthetic construct
  source 1..19: mol_type = other RNA
ttgtagtagtcgcagaaca

SEQ ID NO: 80 - RNA, 19 nt, synthetic construct
  source 1..19: mol_type = other RNA
ntgtagtagtcgcagaaca

SEQ ID NO: 81 - RNA, 19 nt, synthetic construct
  source 1..19: mol_type = other RNA
ttgtagtagtcgcagaacn

SEQ ID NO: 82 - RNA, 19 nt, synthetic construct
  source 1..19: mol_type = other RNA
ntgtagtagtcgcagaacn

SEQ ID NO: 83 - RNA, 19 nt, synthetic construct
  source 1..19: mol_type = other RNA
ttcttgttcaggcaaatca

SEQ ID NO: 84 - RNA, 19 nt, synthetic construct
  source 1..19: mol_type = other RNA
ntcttgttcaggcaaatca

SEQ ID NO: 85 - RNA, 19 nt, synthetic construct
  source 1..19: mol_type = other RNA
ttcttgttcaggcaaatcn

SEQ ID NO: 86 - RNA, 19 nt, synthetic construct
  source 1..19: mol_type = other RNA
ntcttgttcaggcaaatcn

SEQ ID NO: 87 - RNA, 19 nt, synthetic construct
  source 1..19: mol_type = other RNA
cttgatggccttggagcag

SEQ ID NO: 88 - RNA, 19 nt, synthetic construct
  source 1..19: mol_type = other RNA
tttgatggccttggagcag

SEQ ID NO: 89 - RNA, 19 nt, synthetic construct
  source 1..19: mol_type = other RNA
nttgatggccttggagcag

SEQ ID NO: 90 - RNA, 19 nt, synthetic construct
  source 1..19: mol_type = other RNA
tttgatggccttggagcan

SEQ ID NO: 91 - RNA, 19 nt, synthetic construct
  source 1..19: mol_type = other RNA
nttgatggccttggagcan

SEQ ID NO: 92 - RNA, 19 nt, synthetic construct
  source 1..19: mol_type = other RNA
aatcttgatggccttggag

SEQ ID NO: 93 - RNA, 19 nt, synthetic construct
  source 1..19: mol_type = other RNA
aatcttgatggccttggan

SEQ ID NO: 94 - RNA, 19 nt, synthetic construct
  source 1..19: mol_type = other RNA
tatcttgatggccttggag

SEQ ID NO: 95 - RNA, 19 nt, synthetic construct
  source 1..19: mol_type = other RNA
tatcttgatggccttggan

SEQ ID NO: 96 - RNA, 19 nt, synthetic construct
  source 1..19: mol_type = other RNA
natcttgatggccttggag

SEQ ID NO: 97 - RNA, 19 nt, synthetic construct
  source 1..19: mol_type = other RNA
natcttgatggccttggan

SEQ ID NO: 98 - RNA, 19 nt, synthetic construct
  source 1..19: mol_type = other RNA
cttgaactcggggctgagg

SEQ ID NO: 99 - RNA, 19 nt, synthetic construct
  source 1..19: mol_type = other RNA
tttgaactcggggctgagg

SEQ ID NO: 100 - RNA, 19 nt, synthetic construct
  source 1..19: mol_type = other RNA
nttgaactcggggctgagg

SEQ ID NO: 101 - RNA, 19 nt, synthetic construct
  source 1..19: mol_type = other RNA
tttgaactcggggctgagn

SEQ ID NO: 102 - RNA, 19 nt, synthetic construct
  source 1..19: mol_type = other RNA
nttgaactcggggctgagn

SEQ ID NO: 103 - RNA, 19 nt, synthetic construct
  source 1..19: mol_type = other RNA
ggatgctgcactgcttctg

SEQ ID NO: 104 - RNA, 19 nt, synthetic construct
  source 1..19: mol_type = other RNA
tgatgctgcactgcttctg

SEQ ID NO: 105 - RNA, 19 nt, synthetic construct
  source 1..19: mol_type = other RNA
ngatgctgcactgcttctg

SEQ ID NO: 106 - RNA, 19 nt, synthetic construct
  source 1..19: mol_type = other RNA
tgatgctgcactgcttctn

SEQ ID NO: 107 - RNA, 19 nt, synthetic construct
  source 1..19: mol_type = other RNA
ngatgctgcactgcttctn

SEQ ID NO: 108 - RNA, 19 nt, synthetic construct
  source 1..19: mol_type = other RNA
tgatgctgcactgcttctg

SEQ ID NO: 109 - RNA, 19 nt, synthetic construct
  source 1..19: mol_type = other RNA
tgatgctgcactgcttctn

SEQ ID NO: 110 - RNA, 19 nt, synthetic construct
  source 1..19: mol_type = other RNA
ngatgctgcactgcttctg

SEQ ID NO: 111 - RNA, 19 nt, synthetic construct
  source 1..19: mol_type = other RNA
ngatgctgcactgcttctn

SEQ ID NO: 112 - RNA, 19 nt, synthetic construct
  source 1..19: mol_type = other RNA
gtagtcgcagaacagaggg

SEQ ID NO: 113 - RNA, 19 nt, synthetic construct
  source 1..19: mol_type = other RNA
ttagtcgcagaacagaggg

SEQ ID NO: 114 - RNA, 19 nt, synthetic construct
  source 1..19: mol_type = other RNA
ttagtcgcagaacagaggn

SEQ ID NO: 115 - RNA, 19 nt, synthetic construct
  source 1..19: mol_type = other RNA
ntagtcgcagaacagaggg

SEQ ID NO: 116 - RNA, 19 nt, synthetic construct
  source 1..19: mol_type = other RNA
ntagtcgcagaacagaggn

SEQ ID NO: 117 - RNA, 19 nt, synthetic construct
  source 1..19: mol_type = other RNA
ttagtcgcagaacagaggg

SEQ ID NO: 118 - RNA, 19 nt, synthetic construct
  source 1..19: mol_type = other RNA
ttagtcgcagaacagaggn

SEQ ID NO: 119 - RNA, 19 nt, synthetic construct
  source 1..19: mol_type = other RNA
ntagtcgcagaacagaggg

SEQ ID NO: 120 - RNA, 19 nt, synthetic construct
  source 1..19: mol_type = other RNA
ntagtcgcagaacagaggn

SEQ ID NO: 121 - RNA, 19 nt, synthetic construct
  source 1..19: mol_type = other RNA
agtagtcgcagaacagagg

SEQ ID NO: 122 - RNA, 19 nt, synthetic construct
  source 1..19: mol_type = other RNA
agtagtcgcagaacagagn

SEQ ID NO: 123 - RNA, 19 nt, synthetic construct
  source 1..19: mol_type = other RNA
tgtagtcgcagaacagagg

SEQ ID NO: 124 - RNA, 19 nt, synthetic construct
  source 1..19: mol_type = other RNA
tgtagtcgcagaacagagn

SEQ ID NO: 125 - RNA, 19 nt, synthetic construct
  source 1..19: mol_type = other RNA
ngtagtcgcagaacagagg

SEQ ID NO: 126 - RNA, 19 nt, synthetic construct
  source 1..19: mol_type = other RNA
ngtagtcgcagaacagagn

SEQ ID NO: 127 - RNA, 19 nt, synthetic construct
  source 1..19: mol_type = other RNA
agtagtcgcagaacagagg

SEQ ID NO: 128 - RNA, 19 nt, synthetic construct
  source 1..19: mol_type = other RNA
agtagtcgcagaacagagn

SEQ ID NO: 129 - RNA, 19 nt, synthetic construct
  source 1..19: mol_type = other RNA
tgtagtcgcagaacagagg

SEQ ID NO: 130 - RNA, 19 nt, synthetic construct
  source 1..19: mol_type = other RNA
tgtagtcgcagaacagagn

SEQ ID NO: 131 - RNA, 19 nt, synthetic construct
  source 1..19: mol_type = other RNA
ngtagtcgcagaacagagg

SEQ ID NO: 132 - RNA, 19 nt, synthetic construct
  source 1..19: mol_type = other RNA
ngtagtcgcagaacagagn

SEQ ID NO: 133 - RNA, 19 nt, synthetic construct
  source 1..19: mol_type = other RNA
gtagtagtcgcagaacaga

SEQ ID NO: 134 - RNA, 19 nt, synthetic construct
  source 1..19: mol_type = other RNA
ttagtagtcgcagaacaga

SEQ ID NO: 135 - RNA, 19 nt, synthetic construct
  source 1..19: mol_type = other RNA
ntagtagtcgcagaacaga

SEQ ID NO: 136 - RNA, 19 nt, synthetic construct
  source 1..19: mol_type = other RNA
ntagtagtcgcagaacagn

SEQ ID NO: 137 - RNA, 19 nt, synthetic construct
  source 1..19: mol_type = other RNA
tgtagtagtcgcagaacag

SEQ ID NO: 138 - RNA, 19 nt, synthetic construct
  source 1..19: mol_type = other RNA
ngtagtagtcgcagaacag

SEQ ID NO: 139 - RNA, 19 nt, synthetic construct
  source 1..19: mol_type = other RNA
ngtagtagtcgcagaacan

SEQ ID NO: 140 - RNA, 19 nt, synthetic construct
  source 1..19: mol_type = other RNA
atagttgtagcagatgggt

SEQ ID NO: 141 - RNA, 19 nt, synthetic construct
  source 1..19: mol_type = other RNA
atagttgtagcagatgggn

SEQ ID NO: 142 - RNA, 19 nt, synthetic construct
  source 1..19: mol_type = other RNA
ttagttgtagcagatgggt

SEQ ID NO: 143 - RNA, 19 nt, synthetic construct
  source 1..19: mol_type = other RNA
ttagttgtagcagatgggn

SEQ ID NO: 144 - RNA, 19 nt, synthetic construct
  source 1..19: mol_type = other RNA
ntagttgtagcagatgggt

SEQ ID NO: 145 - RNA, 19 nt, synthetic construct
  source 1..19: mol_type = other RNA
ntagttgtagcagatgggn

SEQ ID NO: 146 - RNA, 19 nt, synthetic construct
  source 1..19: mol_type = other RNA
gtccacgtcgaaccacttt

SEQ ID NO: 147 - RNA, 19 nt, synthetic construct
  source 1..19: mol_type = other RNA
ttccacgtcgaaccacttt

SEQ ID NO: 148 - RNA, 19 nt, synthetic construct
  source 1..19: mol_type = other RNA
ttccacgtcgaaccacttn

SEQ ID NO: 149 - RNA, 19 nt, synthetic construct
  source 1..19: mol_type = other RNA
ntccacgtcgaaccacttt

SEQ ID NO: 150 - RNA, 19 nt, synthetic construct
  source 1..19: mol_type = other RNA
ntccacgtcgaaccacttn

SEQ ID NO: 151 - RNA, 19 nt, synthetic construct
  source 1..19: mol_type = other RNA
ttccacgtcgaaccacttt

SEQ ID NO: 152 - RNA, 19 nt, synthetic construct
  source 1..19: mol_type = other RNA
ttccacgtcgaaccacttn

SEQ ID NO: 153 - RNA, 19 nt, synthetic construct
  source 1..19: mol_type = other RNA
ntccacgtcgaaccacttt

SEQ ID NO: 154 - RNA, 19 nt, synthetic construct
  source 1..19: mol_type = other RNA
ntccacgtcgaaccacttn

SEQ ID NO: 155 - RNA, 19 nt, synthetic construct
  source 1..19: mol_type = other RNA
gaagtccacgtcgaaccac

SEQ ID NO: 156 - RNA, 19 nt, synthetic construct
  source 1..19: mol_type = other RNA
taagtccacgtcgaaccac

SEQ ID NO: 157 - RNA, 19 nt, synthetic construct
  source 1..19: mol_type = other RNA
taagtccacgtcgaaccan

SEQ ID NO: 158 - RNA, 19 nt, synthetic construct
  source 1..19: mol_type = other RNA
naagtccacgtcgaaccac

SEQ ID NO: 159 - RNA, 19 nt, synthetic construct
  source 1..19: mol_type = other RNA
naagtccacgtcgaaccan

SEQ ID NO: 160 - RNA, 19 nt, synthetic construct
  source 1..19: mol_type = other RNA
taagtccacgtcgaaccac

SEQ ID NO: 161 - RNA, 19 nt, synthetic construct
  source 1..19: mol_type = other RNA
taagtccacgtcgaaccan

SEQ ID NO: 162 - RNA, 19 nt, synthetic construct
  source 1..19: mol_type = other RNA
naagtccacgtcgaaccac

SEQ ID NO: 163 - RNA, 19 nt, synthetic construct
  source 1..19: mol_type = other RNA
naagtccacgtcgaaccan

SEQ ID NO: 164 - RNA, 19 nt, synthetic construct
  source 1..19: mol_type = other RNA
gggaagtccacgtcgaacc

SEQ ID NO: 165 - RNA, 19 nt, synthetic construct
  source 1..19: mol_type = other RNA
tggaagtccacgtcgaacc

SEQ ID NO: 166 - RNA, 19 nt, synthetic construct
  source 1..19: mol_type = other RNA
tggaagtccacgtcgaacn

SEQ ID NO: 167 - RNA, 19 nt, synthetic construct
  source 1..19: mol_type = other RNA
nggaagtccacgtcgaacc

SEQ ID NO: 168 - RNA, 19 nt, synthetic construct
  source 1..19: mol_type = other RNA
nggaagtccacgtcgaacn

SEQ ID NO: 169 - RNA, 19 nt, synthetic construct
  source 1..19: mol_type = other RNA
tggaagtccacgtcgaacc

SEQ ID NO: 170 - RNA, 19 nt, synthetic construct
  source 1..19: mol_type = other RNA
tggaagtccacgtcgaacn

SEQ ID NO: 171 - RNA, 19 nt, synthetic construct
  source 1..19: mol_type = other RNA
nggaagtccacgtcgaacc

SEQ ID NO: 172 - RNA, 19 nt, synthetic construct
  source 1..19: mol_type = other RNA
nggaagtccacgtcgaacn

SEQ ID NO: 173 - RNA, 19 nt, synthetic construct
  source 1..19: mol_type = other RNA
agatgctggtcttcttgtc

SEQ ID NO: 174 - RNA, 19 nt, synthetic construct
  source 1..19: mol_type = other RNA
agatgctggtcttcttgtn

SEQ ID NO: 175 - RNA, 19 nt, synthetic construct
  source 1..19: mol_type = other RNA
tgatgctggtcttcttgtc

SEQ ID NO: 176 - RNA, 19 nt, synthetic construct
  source 1..19: mol_type = other RNA
tgatgctggtcttcttgtn

SEQ ID NO: 177 - RNA, 19 nt, synthetic construct
  source 1..19: mol_type = other RNA
ngatgctggtcttcttgtc

SEQ ID NO: 178 - RNA, 19 nt, synthetic construct
  source 1..19: mol_type = other RNA
ngatgctggtcttcttgtn

SEQ ID NO: 179 - RNA, 19 nt, synthetic construct
  source 1..19: mol_type = other RNA
agatgctggtcttcttgtc

SEQ ID NO: 180 - RNA, 19 nt, synthetic construct
  source 1..19: mol_type = other RNA
agatgctggtcttcttgtn

SEQ ID NO: 181 - RNA, 19 nt, synthetic construct
  source 1..19: mol_type = other RNA
tgatgctggtcttcttgtc

SEQ ID NO: 182 - RNA, 19 nt, synthetic construct
  source 1..19: mol_type = other RNA
tgatgctggtcttcttgtn

SEQ ID NO: 183 - RNA, 19 nt, synthetic construct
  source 1..19: mol_type = other RNA
ngatgctggtcttcttgtc

SEQ ID NO: 184 - RNA, 19 nt, synthetic construct
  source 1..19: mol_type = other RNA
ngatgctggtcttcttgtn

SEQ ID NO: 185 - RNA, 19 nt, synthetic construct
  source 1..19: mol_type = other RNA
ggttgatgaagatgctggt

SEQ ID NO: 186 - RNA, 19 nt, synthetic construct
  source 1..19: mol_type = other RNA
tgttgatgaagatgctggn

SEQ ID NO: 187 - RNA, 19 nt, synthetic construct
  source 1..19: mol_type = other RNA
ngttgatgaagatgctggt

SEQ ID NO: 188 - RNA, 19 nt, synthetic construct
  source 1..19: mol_type = other RNA
ngttgatgaagatgctggn

SEQ ID NO: 189 - RNA, 19 nt, synthetic construct
  source 1..19: mol_type = other RNA
atgttgttgtaggtttcct

SEQ ID NO: 190 - RNA, 19 nt, synthetic construct
  source 1..19: mol_type = other RNA
atgttgttgtaggtttccn

SEQ ID NO: 191 - RNA, 19 nt, synthetic construct
  source 1..19: mol_type = other RNA
ttgttgttgtaggtttcct

SEQ ID NO: 192 - RNA, 19 nt, synthetic construct
  source 1..19: mol_type = other RNA
ttgttgttgtaggtttccn

SEQ ID NO: 193 - RNA, 19 nt, synthetic construct
  source 1..19: mol_type = other RNA
ntgttgttgtaggtttccn

SEQ ID NO: 194 - RNA, 19 nt, synthetic construct
  source 1..19: mol_type = other RNA
atgatgttgttgtaggttt

SEQ ID NO: 195 - RNA, 19 nt, synthetic construct
  source 1..19: mol_type = other RNA
atgatgttgttgtaggttn

SEQ ID NO: 196 - RNA, 19 nt, synthetic construct
  source 1..19: mol_type = other RNA
ttgatgttgttgtaggttt

SEQ ID NO: 197 - RNA, 19 nt, synthetic construct
  source 1..19: mol_type = other RNA
ttgatgttgttgtaggttn

SEQ ID NO: 198 - RNA, 19 nt, synthetic construct
  source 1..19: mol_type = other RNA
ntgatgttgttgtaggttn

SEQ ID NO: 199 - RNA, 19 nt, synthetic construct
  source 1..19: mol_type = other RNA
ttgatgaagatgctggtct

SEQ ID NO: 200 - RNA, 19 nt, synthetic construct
  source 1..19: mol_type = other RNA
ttgatgaagatgctggtcn

SEQ ID NO: 201 - RNA, 19 nt, synthetic construct
  source 1..19: mol_type = other RNA
ntgatgaagatgctggtct

SEQ ID NO: 202 - RNA, 19 nt, synthetic construct
  source 1..19: mol_type = other RNA
ntgatgaagatgctggtcn

SEQ ID NO: 203 - RNA, 19 nt, synthetic construct
  source 1..19: mol_type = other RNA
tgatctggtagttgtagca

SEQ ID NO: 204 - RNA, 19 nt, synthetic construct
  source 1..19: mol_type = other RNA
tgatctggtagttgtagcn

SEQ ID NO: 205 - RNA, 19 nt, synthetic construct
  source 1..19: mol_type = other RNA
ngatctggtagttgtagca

SEQ ID NO: 206 - RNA, 19 nt, synthetic construct
  source 1..19: mol_type = other RNA
ngatctggtagttgtagcn

SEQ ID NO: 207 - RNA, 19 nt, synthetic construct
  source 1..19: mol_type = other RNA
tgatctggtagttgtagcn

SEQ ID NO: 208 - RNA, 19 nt, synthetic construct
  source 1..19: mol_type = other RNA
ngatctggtagttgtagca

SEQ ID NO: 209 - RNA, 19 nt, synthetic construct
  source 1..19: mol_type = other RNA
ngatctggtagttgtagcn

SEQ ID NO: 210 - RNA, 19 nt, synthetic construct
  source 1..19: mol_type = other RNA
tgatctggtagttgtagcn

SEQ ID NO: 211 - RNA, 19 nt, synthetic construct
  source 1..19: mol_type = other RNA
ccctgatctggtagttgta

SEQ ID NO: 212 - RNA, 19 nt, synthetic construct
  source 1..19: mol_type = other RNA
tcctgatctggtagttgta

SEQ ID NO: 213 - RNA, 19 nt, synthetic construct
  source 1..19: mol_type = other RNA
ncctgatctggtagttgta

SEQ ID NO: 214 - RNA, 19 nt, synthetic construct
  source 1..19: mol_type = other RNA
tcctgatctggtagttgtn

SEQ ID NO: 215 - RNA, 19 nt, synthetic construct
  source 1..19: mol_type = other RNA
ncctgatctggtagttgtn

SEQ ID NO: 216 - RNA, 19 nt, synthetic construct
  source 1..19: mol_type = other RNA
ccctgatctggtagttgta

SEQ ID NO: 217 - RNA, 19 nt, synthetic construct
  source 1..19: mol_type = other RNA
tcctgatctggtagttgta

SEQ ID NO: 218 - RNA, 19 nt, synthetic construct
  source 1..19: mol_type = other RNA
ncctgatctggtagttgta

SEQ ID NO: 219 - RNA, 19 nt, synthetic construct
  source 1..19: mol_type = other RNA
tcctgatctggtagttgtn

SEQ ID NO: 220 - RNA, 19 nt, synthetic construct
  source 1..19: mol_type = other RNA
ncctgatctggtagttgtn

SEQ ID NO: 221 - RNA, 19 nt, synthetic construct
  source 1..19: mol_type = other RNA
tagttgtagcagatgggtg

SEQ ID NO: 222 - RNA, 19 nt, synthetic construct
  source 1..19: mol_type = other RNA
nagttgtagcagatgggtg

SEQ ID NO: 223 - RNA, 19 nt, synthetic construct
  source 1..19: mol_type = other RNA
tagttgtagcagatgggtn

SEQ ID NO: 224 - RNA, 19 nt, synthetic construct
  source 1..19: mol_type = other RNA
nagttgtagcagatgggtn

SEQ ID NO: 225 - RNA, 19 nt, synthetic construct
  source 1..19: mol_type = other RNA
gcaacactggatgcggatc

SEQ ID NO: 226 - RNA, 19 nt, synthetic construct
  source 1..19: mol_type = other RNA
tcaacactggatgcggatc

SEQ ID NO: 227 - RNA, 19 nt, synthetic construct
  source 1..19: mol_type = other RNA
ncaacactggatgcggatc

SEQ ID NO: 228 - RNA, 19 nt, synthetic construct
  source 1..19: mol_type = other RNA
tcaacactggatgcggatn

SEQ ID NO: 229 - RNA, 19 nt, synthetic construct
  source 1..19: mol_type = other RNA
ncaacactggatgcggatn

SEQ ID NO: 230 - RNA, 19 nt, synthetic construct
  source 1..19: mol_type = other RNA
gcaacactggatgcggatc

SEQ ID NO: 231 - RNA, 19 nt, synthetic construct
  source 1..19: mol_type = other RNA
tcaacactggatgcggatc

SEQ ID NO: 232 - RNA, 19 nt, synthetic construct
  source 1..19: mol_type = other RNA
ncaacactggatgcggatc

SEQ ID NO: 233 - RNA, 19 nt, synthetic construct
  source 1..19: mol_type = other RNA
tcaacactggatgcggatn

SEQ ID NO: 234 - RNA, 19 nt, synthetic construct
  source 1..19: mol_type = other RNA
ncaacactggatgcggatn

SEQ ID NO: 235 - RNA, 19 nt, synthetic construct
  source 1..19: mol_type = other RNA
gtgttcgatgctcacctct

SEQ ID NO: 236 - RNA, 19 nt, synthetic construct
  source 1..19: mol_type = other RNA
ttgttcgatgctcacctct

SEQ ID NO: 237 - RNA, 19 nt, synthetic construct
  source 1..19: mol_type = other RNA
ntgttcgatgctcacctct

SEQ ID NO: 238 - RNA, 19 nt, synthetic construct
  source 1..19: mol_type = other RNA
ttgttcgatgctcacctcn

SEQ ID NO: 239 - RNA, 19 nt, synthetic construct
  source 1..19: mol_type = other RNA
ntgttcgatgctcacctcn

SEQ ID NO: 240 - RNA, 19 nt, synthetic construct
  source 1..19: mol_type = other RNA
gtgttcgatgctcacctct

SEQ ID NO: 241 - RNA, 19 nt, synthetic construct
  source 1..19: mol_type = other RNA
ttgttcgatgctcacctct

SEQ ID NO: 242 - RNA, 19 nt, synthetic construct
  source 1..19: mol_type = other RNA
ntgttcgatgctcacctct

SEQ ID NO: 243 - RNA, 19 nt, synthetic construct
  source 1..19: mol_type = other RNA
ttgttcgatgctcacctcn

SEQ ID NO: 244 - RNA, 19 nt, synthetic construct
  source 1..19: mol_type = other RNA
ntgttcgatgctcacctcn

SEQ ID NO: 245 - RNA, 19 nt, synthetic construct
  source 1..19: mol_type = other RNA
catcttgaagggtccctgc

SEQ ID NO: 246 - RNA, 19 nt, synthetic construct
  source 1..19: mol_type = other RNA
tatcttgaagggtccctgc

SEQ ID NO: 247 - RNA, 19 nt, synthetic construct
  source 1..19: mol_type = other RNA
natcttgaagggtccctgc

SEQ ID NO: 248 - RNA, 19 nt, synthetic construct
  source 1..19: mol_type = other RNA
tatcttgaagggtccctgn

SEQ ID NO: 249 - RNA, 19 nt, synthetic construct
  source 1..19: mol_type = other RNA
natcttgaagggtccctgn

SEQ ID NO: 250 - RNA, 19 nt, synthetic construct
  source 1..19: mol_type = other RNA
tcgtagttgaggcacatct

SEQ ID NO: 251 - RNA, 19 nt, synthetic construct
  source 1..19: mol_type = other RNA
ncgtagttgaggcacatct

SEQ ID NO: 252 - RNA, 19 nt, synthetic construct
  source 1..19: mol_type = other RNA
tcgtagttgaggcacatcn

SEQ ID NO: 253 - RNA, 19 nt, synthetic construct
  source 1..19: mol_type = other RNA
ncgtagttgaggcacatcn

SEQ ID NO: 254 - RNA, 19 nt, synthetic construct
  source 1..19: mol_type = other RNA
tcgtagttgaggcacatct

SEQ ID NO: 255 - RNA, 19 nt, synthetic construct
  source 1..19: mol_type = other RNA
ncgtagttgaggcacatct

SEQ ID NO: 256 - RNA, 19 nt, synthetic construct
  source 1..19: mol_type = other RNA
tcgtagttgaggcacatcn

SEQ ID NO: 257 - RNA, 19 nt, synthetic construct
  source 1..19: mol_type = other RNA
ncgtagttgaggcacatcn

SEQ ID NO: 258 - RNA, 19 nt, synthetic construct
  source 1..19: mol_type = other RNA
cctcgtagttgaggcacat

SEQ ID NO: 259 - RNA, 19 nt, synthetic construct
  source 1..19: mol_type = other RNA
tctcgtagttgaggcacat

SEQ ID NO: 260 - RNA, 19 nt, synthetic construct
  source 1..19: mol_type = other RNA
nctcgtagttgaggcacat

SEQ ID NO: 261 - RNA, 19 nt, synthetic construct
  source 1..19: mol_type = other RNA
tctcgtagttgaggcacan

SEQ ID NO: 262 - RNA, 19 nt, synthetic construct
  source 1..19: mol_type = other RNA
nctcgtagttgaggcacan

SEQ ID NO: 263 - RNA, 19 nt, synthetic construct
  source 1..19: mol_type = other RNA
cctcgtagttgaggcacat

SEQ ID NO: 264 - RNA, 19 nt, synthetic construct
  source 1..19: mol_type = other RNA
tctcgtagttgaggcacat

SEQ ID NO: 265 - RNA, 19 nt, synthetic construct
  source 1..19: mol_type = other RNA
nctcgtagttgaggcacat

SEQ ID NO: 266 - RNA, 19 nt, synthetic construct
  source 1..19: mol_type = other RNA
tctcgtagttgaggcacan

SEQ ID NO: 267 - RNA, 19 nt, synthetic construct
  source 1..19: mol_type = other RNA
nctcgtagttgaggcacan

SEQ ID NO: 268 - RNA, 19 nt, synthetic construct
  source 1..19: mol_type = other RNA
cttcaggcaggtctcgctg

SEQ ID NO: 269 - RNA, 19 nt, synthetic construct
  source 1..19: mol_type = other RNA
tttcaggcaggtctcgctg

SEQ ID NO: 270 - RNA, 19 nt, synthetic construct
  source 1..19: mol_type = other RNA
nttcaggcaggtctcgctg

SEQ ID NO: 271 - RNA, 19 nt, synthetic construct
  source 1..19: mol_type = other RNA
tttcaggcaggtctcgctn

SEQ ID NO: 272 - RNA, 19 nt, synthetic construct
  source 1..19: mol_type = other RNA
nttcaggcaggtctcgctn

SEQ ID NO: 273 - RNA, 19 nt, synthetic construct
  source 1..19: mol_type = other RNA
gtctgaagatggtgacgtt

SEQ ID NO: 274 - RNA, 19 nt, synthetic construct
  source 1..19: mol_type = other RNA
ttctgaagatggtgacgtt

SEQ ID NO: 275 - RNA, 19 nt, synthetic construct
  source 1..19: mol_type = other RNA
ntctgaagatggtgacgtt

SEQ ID NO: 276 - RNA, 19 nt, synthetic construct
  source 1..19: mol_type = other RNA
ttctgaagatggtgacgtn

SEQ ID NO: 277 - RNA, 19 nt, synthetic construct
  source 1..19: mol_type = other RNA
ntctgaagatggtgacgtn

SEQ ID NO: 278 - RNA, 19 nt, synthetic construct
  source 1..19: mol_type = other RNA
ggtctgaagatggtgacgt

SEQ ID NO: 279 - RNA, 19 nt, synthetic construct
  source 1..19: mol_type = other RNA
tgtctgaagatggtgacgt

SEQ ID NO: 280 - RNA, 19 nt, synthetic construct
  source 1..19: mol_type = other RNA
ngtctgaagatggtgacgt

SEQ ID NO: 281 - RNA, 19 nt, synthetic construct
  source 1..19: mol_type = other RNA
tgtctgaagatggtgacgn

SEQ ID NO: 282 - RNA, 19 nt, synthetic construct
  source 1..19: mol_type = other RNA
ngtctgaagatggtgacgn

SEQ ID NO: 283 - RNA, 19 nt, synthetic construct
  source 1..19: mol_type = other RNA
ggtctgaagatggtgacgt

SEQ ID NO: 284 - RNA, 19 nt, synthetic construct
  source 1..19: mol_type = other RNA
tgtctgaagatggtgacgt

SEQ ID NO: 285 - RNA, 19 nt, synthetic construct
  source 1..19: mol_type = other RNA
ngtctgaagatggtgacgt

SEQ ID NO: 286 - RNA, 19 nt, synthetic construct
  source 1..19: mol_type = other RNA
tgtctgaagatggtgacgn

SEQ ID NO: 287 - RNA, 19 nt, synthetic construct
  source 1..19: mol_type = other RNA
ngtctgaagatggtgacgn

SEQ ID NO: 288 - RNA, 19 nt, synthetic construct
  source 1..19: mol_type = other RNA
cggaagtcatcggcctgga

SEQ ID NO: 289 - RNA, 19 nt, synthetic construct
  source 1..19: mol_type = other RNA
tggaagtcatcggcctgga

SEQ ID NO: 290 - RNA, 19 nt, synthetic construct
  source 1..19: mol_type = other RNA
nggaagtcatcggcctgga

SEQ ID NO: 291 - RNA, 19 nt, synthetic construct
  source 1..19: mol_type = other RNA
tggaagtcatcggcctggn

SEQ ID NO: 292 - RNA, 19 nt, synthetic construct
  source 1..19: mol_type = other RNA
nggaagtcatcggcctggn

SEQ ID NO: 293 - RNA, 19 nt, synthetic construct
  source 1..19: mol_type = other RNA
cttgaaggtgttgaagaag

SEQ ID NO: 294 - RNA, 19 nt, synthetic construct
  source 1..19: mol_type = other RNA
tttgaaggtgttgaagaag

SEQ ID NO: 295 - RNA, 19 nt, synthetic construct
  source 1..19: mol_type = other RNA
nttgaaggtgttgaagaag

SEQ ID NO: 296 - RNA, 19 nt, synthetic construct
  source 1..19: mol_type = other RNA
tttgaaggtgttgaagaan

SEQ ID NO: 297 - RNA, 19 nt, synthetic construct
  source 1..19: mol_type = other RNA
nttgaaggtgttgaagaan

SEQ ID NO: 298 - RNA, 19 nt, synthetic construct
  source 1..19: mol_type = other RNA
tgcagttcgagtagtaggt

SEQ ID NO: 299 - RNA, 19 nt, synthetic construct
  source 1..19: mol_type = other RNA
ngcagttcgagtagtaggt

SEQ ID NO: 300 - RNA, 19 nt, synthetic construct
  source 1..19: mol_type = other RNA
tgcagttcgagtagtaggn

SEQ ID NO: 301 - RNA, 19 nt, synthetic construct
  source 1..19: mol_type = other RNA
ngcagttcgagtagtaggn

SEQ ID NO: 302 - RNA, 19 nt, synthetic construct
  source 1..19: mol_type = other RNA
tgcagttcgagtagtaggt

SEQ ID NO: 303 - RNA, 19 nt, synthetic construct
  source 1..19: mol_type = other RNA
ngcagttcgagtagtaggt

SEQ ID NO: 304 - RNA, 19 nt, synthetic construct
  source 1..19: mol_type = other RNA
tgcagttcgagtagtaggn

SEQ ID NO: 305 - RNA, 19 nt, synthetic construct
  source 1..19: mol_type = other RNA
ngcagttcgagtagtaggn

SEQ ID NO: 306 - RNA, 19 nt, synthetic construct
  source 1..19: mol_type = other RNA
cttggagcaggtggtccct

SEQ ID NO: 307 - RNA, 19 nt, synthetic construct
  source 1..19: mol_type = other RNA
tttggagcaggtggtccct

SEQ ID NO: 308 - RNA, 19 nt, synthetic construct
  source 1..19: mol_type = other RNA
nttggagcaggtggtccct

SEQ ID NO: 309 - RNA, 19 nt, synthetic construct
  source 1..19: mol_type = other RNA
tttggagcaggtggtcccn

SEQ ID NO: 310 - RNA, 19 nt, synthetic construct
  source 1..19: mol_type = other RNA
nttggagcaggtggtcccn

SEQ ID NO: 311 - RNA, 19 nt, synthetic construct
  source 1..19: mol_type = other RNA
tcttgatggccttggagca

SEQ ID NO: 312 - RNA, 19 nt, synthetic construct
  source 1..19: mol_type = other RNA
ncttgatggccttggagca

SEQ ID NO: 313 - RNA, 19 nt, synthetic construct
  source 1..19: mol_type = other RNA
tcttgatggccttggagcn

SEQ ID NO: 314 - RNA, 19 nt, synthetic construct
  source 1..19: mol_type = other RNA
ncttgatggccttggagcn

SEQ ID NO: 315 - RNA, 19 nt, synthetic construct
  source 1..19: mol_type = other RNA
ctgtcatcgtggttccaca

SEQ ID NO: 316 - RNA, 19 nt, synthetic construct
  source 1..19: mol_type = other RNA
ttgtcatcgtggttccaca

SEQ ID NO: 317 - RNA, 19 nt, synthetic construct
  source 1..19: mol_type = other RNA
ntgtcatcgtggttccaca

SEQ ID NO: 318 - RNA, 19 nt, synthetic construct
  source 1..19: mol_type = other RNA
ttgtcatcgtggttccacn

SEQ ID NO: 319 - RNA, 19 nt, synthetic construct
  source 1..19: mol_type = other RNA
ntgtcatcgtggttccacn

SEQ ID NO: 320 - RNA, 19 nt, synthetic construct
  source 1..19: mol_type = other RNA
ctgtcatcgtggttccaca

SEQ ID NO: 321 - RNA, 19 nt, synthetic construct
  source 1..19: mol_type = other RNA
ttgtcatcgtggttccaca

SEQ ID NO: 322 - RNA, 19 nt, synthetic construct
  source 1..19: mol_type = other RNA
ntgtcatcgtggttccaca

SEQ ID NO: 323 - RNA, 19 nt, synthetic construct
  source 1..19: mol_type = other RNA
ttgtcatcgtggttccacn

SEQ ID NO: 324 - RNA, 19 nt, synthetic construct
  source 1..19: mol_type = other RNA
ntgtcatcgtggttccacn

SEQ ID NO: 325 - RNA, 19 nt, synthetic construct
  source 1..19: mol_type = other RNA
acagaagcagaggtcttgc

SEQ ID NO: 326 - RNA, 19 nt, synthetic construct
  source 1..19: mol_type = other RNA
acagaagcagaggtcttgn

SEQ ID NO: 327 - RNA, 19 nt, synthetic construct
  source 1..19: mol_type = other RNA
tcagaagcagaggtcttgc

SEQ ID NO: 328 - RNA, 19 nt, synthetic construct
  source 1..19: mol_type = other RNA
tcagaagcagaggtcttgn

SEQ ID NO: 329 - RNA, 19 nt, synthetic construct
  source 1..19: mol_type = other RNA
acagaagcagaggtcttgc

SEQ ID NO: 330 - RNA, 19 nt, synthetic construct
  source 1..19: mol_type = other RNA
acagaagcagaggtcttgn

SEQ ID NO: 331 - RNA, 19 nt, synthetic construct
  source 1..19: mol_type = other RNA
tcagaagcagaggtcttgc

SEQ ID NO: 332 - RNA, 19 nt, synthetic construct
  source 1..19: mol_type = other RNA
tcagaagcagaggtcttgn

SEQ ID NO: 333 - RNA, 19 nt, synthetic construct
  source 1..19: mol_type = other RNA
gcagttggtgcagtctgtg

SEQ ID NO: 334 - RNA, 19 nt, synthetic construct
  source 1..19: mol_type = other RNA
tcagttggtgcagtctgtg

SEQ ID NO: 335 - RNA, 19 nt, synthetic construct
  source 1..19: mol_type = other RNA
ncagttggtgcagtctgtg

SEQ ID NO: 336 - RNA, 19 nt, synthetic construct
  source 1..19: mol_type = other RNA
tcagttggtgcagtctgtn

SEQ ID NO: 337 - RNA, 19 nt, synthetic construct
  source 1..19: mol_type = other RNA
ncagttggtgcagtctgtn

SEQ ID NO: 338 - RNA, 19 nt, synthetic construct
  source 1..19: mol_type = other RNA
gcagttggtgcagtctgtg

SEQ ID NO: 339 - RNA, 19 nt, synthetic construct
  source 1..19: mol_type = other RNA
tcagttggtgcagtctgtg

SEQ ID NO: 340 - RNA, 19 nt, synthetic construct
  source 1..19: mol_type = other RNA
ncagttggtgcagtctgtg

SEQ ID NO: 341 - RNA, 19 nt, synthetic construct
  source 1..19: mol_type = other RNA
tcagttggtgcagtctgtn

SEQ ID NO: 342 - RNA, 19 nt, synthetic construct
  source 1..19: mol_type = other RNA
ncagttggtgcagtctgtn

SEQ ID NO: 343 - RNA, 19 nt, synthetic construct
  source 1..19: mol_type = other RNA
gcagtacagtgaaggcact

SEQ ID NO: 344 - RNA, 19 nt, synthetic construct
  source 1..19: mol_type = other RNA
tcagtacagtgaaggcact

SEQ ID NO: 345 - RNA, 19 nt, synthetic construct
  source 1..19: mol_type = other RNA
ncagtacagtgaaggcact

SEQ ID NO: 346 - RNA, 19 nt, synthetic construct
  source 1..19: mol_type = other RNA
tcagtacagtgaaggcacn

SEQ ID NO: 347 - RNA, 19 nt, synthetic construct
  source 1..19: mol_type = other RNA
ncagtacagtgaaggcacn

SEQ ID NO: 348 - RNA, 19 nt, synthetic construct
  source 1..19: mol_type = other RNA
gcagtacagtgaaggcact

SEQ ID NO: 349 - RNA, 19 nt, synthetic construct
  source 1..19: mol_type = other RNA
tcagtacagtgaaggcact

SEQ ID NO: 350 - RNA, 19 nt, synthetic construct
  source 1..19: mol_type = other RNA
ncagtacagtgaaggcact

SEQ ID NO: 351 - RNA, 19 nt, synthetic construct
  source 1..19: mol_type = other RNA
tcagtacagtgaaggcacn

SEQ ID NO: 352 - RNA, 19 nt, synthetic construct
  source 1..19: mol_type = other RNA
ncagtacagtgaaggcacn

SEQ ID NO: 353 - RNA, 19 nt, synthetic construct
  source 1..19: mol_type = other RNA
tgctgttgaagttcccaca

SEQ ID NO: 354 - RNA, 19 nt, synthetic construct
  source 1..19: mol_type = other RNA
ngctgttgaagttcccaca

SEQ ID NO: 355 - RNA, 19 nt, synthetic construct
  source 1..19: mol_type = other RNA
tgctgttgaagttcccacn

SEQ ID NO: 356 - RNA, 19 nt, synthetic construct
  source 1..19: mol_type = other RNA
ngctgttgaagttcccacn

SEQ ID NO: 357 - RNA, 19 nt, synthetic construct
  source 1..19: mol_type = other RNA
tgctgttgaagttcccaca

SEQ ID NO: 358 - RNA, 19 nt, synthetic construct
  source 1..19: mol_type = other RNA
ngctgttgaagttcccaca

SEQ ID NO: 359 - RNA, 19 nt, synthetic construct
  source 1..19: mol_type = other RNA
tgctgttgaagttcccacn

SEQ ID NO: 360 - RNA, 19 nt, synthetic construct
  source 1..19: mol_type = other RNA
ngctgttgaagttcccacn

SEQ ID NO: 361 - RNA, 19 nt, synthetic construct
  source 1..19: mol_type = other RNA
ggatgctgttgaagttccc

SEQ ID NO: 362 - RNA, 19 nt, synthetic construct
  source 1..19: mol_type = other RNA
tgatgctgttgaagttccc

SEQ ID NO: 363 - RNA, 19 nt, synthetic construct
  source 1..19: mol_type = other RNA
ngatgctgttgaagttccc

SEQ ID NO: 364 - RNA, 19 nt, synthetic construct
  source 1..19: mol_type = other RNA
tgatgctgttgaagttccn

SEQ ID NO: 365 - RNA, 19 nt, synthetic construct
  source 1..19: mol_type = other RNA
ngatgctgttgaagttccn

SEQ ID NO: 366 - RNA, 19 nt, synthetic construct
  source 1..19: mol_type = other RNA
ggatgctgttgaagttccc

SEQ ID NO: 367 - RNA, 19 nt, synthetic construct
  source 1..19: mol_type = other RNA
tgatgctgttgaagttccc

SEQ ID NO: 368 - RNA, 19 nt, synthetic construct
  source 1..19: mol_type = other RNA
ngatgctgttgaagttccc

SEQ ID NO: 369 - RNA, 19 nt, synthetic construct
  source 1..19: mol_type = other RNA
tgatgctgttgaagttccn

SEQ ID NO: 370 - RNA, 19 nt, synthetic construct
  source 1..19: mol_type = other RNA
ngatgctgttgaagttccn

SEQ ID NO: 371 - RNA, 19 nt, synthetic construct
  source 1..19: mol_type = other RNA
gggtcttgaaggtgttgaa

SEQ ID NO: 372 - RNA, 19 nt, synthetic construct
  source 1..19: mol_type = other RNA
tggtcttgaaggtgttgaa

SEQ ID NO: 373 - RNA, 19 nt, synthetic construct
  source 1..19: mol_type = other RNA
nggtcttgaaggtgttgaa

SEQ ID NO: 374 - RNA, 19 nt, synthetic construct
  source 1..19: mol_type = other RNA
tggtcttgaaggtgttgan

SEQ ID NO: 375 - RNA, 19 nt, synthetic construct
  source 1..19: mol_type = other RNA
nggtcttgaaggtgttgan

SEQ ID NO: 376 - RNA, 19 nt, synthetic construct
  source 1..19: mol_type = other RNA
gggtcttgaaggtgttgaa

SEQ ID NO: 377 - RNA, 19 nt, synthetic construct
  source 1..19: mol_type = other RNA
tggtcttgaaggtgttgaa

SEQ ID NO: 378 - RNA, 19 nt, synthetic construct
  source 1..19: mol_type = other RNA
nggtcttgaaggtgttgaa

SEQ ID NO: 379 - RNA, 19 nt, synthetic construct
  source 1..19: mol_type = other RNA
tggtcttgaaggtgttgan

SEQ ID NO: 380 - RNA, 19 nt, synthetic construct
  source 1..19: mol_type = other RNA
nggtcttgaaggtgttgan

SEQ ID NO: 381 - RNA, 19 nt, synthetic construct
  source 1..19: mol_type = other RNA
aagctgttcctgatgttgg

SEQ ID NO: 382 - RNA, 19 nt, synthetic construct
  source 1..19: mol_type = other RNA
aagctgttcctgatgttgn

SEQ ID NO: 383 - RNA, 19 nt, synthetic construct
  source 1..19: mol_type = other RNA
tagctgttcctgatgttgg

SEQ ID NO: 384 - RNA, 19 nt, synthetic construct
  source 1..19: mol_type = other RNA
tagctgttcctgatgttgn

SEQ ID NO: 385 - RNA, 19 nt, synthetic construct
  source 1..19: mol_type = other RNA
nagctgttcctgatgttgn

SEQ ID NO: 386 - RNA, 19 nt, synthetic construct
  source 1..19: mol_type = other RNA
aagctgttcctgatgttgg

SEQ ID NO: 387 - RNA, 19 nt, synthetic construct
  source 1..19: mol_type = other RNA
aagctgttcctgatgttgn

SEQ ID NO: 388 - RNA, 19 nt, synthetic construct
  source 1..19: mol_type = other RNA
tagctgttcctgatgttgg

SEQ ID NO: 389 - RNA, 19 nt, synthetic construct
  source 1..19: mol_type = other RNA
tagctgttcctgatgttgn

SEQ ID NO: 390 - RNA, 19 nt, synthetic construct
  source 1..19: mol_type = other RNA
nagctgttcctgatgttgn

SEQ ID NO: 391 - RNA, 19 nt, synthetic construct
  source 1..19: mol_type = other RNA
acatgcagttcgagtagta

SEQ ID NO: 392 - RNA, 19 nt, synthetic construct
  source 1..19: mol_type = other RNA
acatgcagttcgagtagtn

SEQ ID NO: 393 - RNA, 19 nt, synthetic construct
  source 1..19: mol_type = other RNA
tcatgcagttcgagtagta

SEQ ID NO: 394 - RNA, 19 nt, synthetic construct
  source 1..19: mol_type = other RNA
tcatgcagttcgagtagtn

SEQ ID NO: 395 - RNA, 19 nt, synthetic construct
  source 1..19: mol_type = other RNA
ncatgcagttcgagtagtn

SEQ ID NO: 396 - RNA, 19 nt, synthetic construct
  source 1..19: mol_type = other RNA
gaagccaacactgcaggtg

SEQ ID NO: 397 - RNA, 19 nt, synthetic construct
  source 1..19: mol_type = other RNA
taagccaacactgcaggtg

SEQ ID NO: 398 - RNA, 19 nt, synthetic construct
  source 1..19: mol_type = other RNA
naagccaacactgcaggtg

SEQ ID NO: 399 - RNA, 19 nt, synthetic construct
  source 1..19: mol_type = other RNA
taagccaacactgcaggtn

SEQ ID NO: 400 - RNA, 19 nt, synthetic construct
  source 1..19: mol_type = other RNA
naagccaacactgcaggtn

SEQ ID NO: 401 - RNA, 19 nt, synthetic construct
  source 1..19: mol_type = other RNA
gaagccaacactgcaggtg

SEQ ID NO: 402 - RNA, 19 nt, synthetic construct
  source 1..19: mol_type = other RNA
taagccaacactgcaggtg

SEQ ID NO: 403 - RNA, 19 nt, synthetic construct
  source 1..19: mol_type = other RNA
naagccaacactgcaggtg

SEQ ID NO: 404 - RNA, 19 nt, synthetic construct
  source 1..19: mol_type = other RNA
taagccaacactgcaggtn

SEQ ID NO: 405 - RNA, 19 nt, synthetic construct
  source 1..19: mol_type = other RNA
naagccaacactgcaggtn

SEQ ID NO: 406 - RNA, 19 nt, synthetic construct
  source 1..19: mol_type = other RNA
ctgtaacaggtcatgtcca

SEQ ID NO: 407 - RNA, 19 nt, synthetic construct
  source 1..19: mol_type = other RNA
ttgtaacaggtcatgtcca

SEQ ID NO: 408 - RNA, 19 nt, synthetic construct
  source 1..19: mol_type = other RNA
ntgtaacaggtcatgtcca

SEQ ID NO: 409 - RNA, 19 nt, synthetic construct
  source 1..19: mol_type = other RNA
ttgtaacaggtcatgtccn

SEQ ID NO: 410 - RNA, 19 nt, synthetic construct
  source 1..19: mol_type = other RNA
ntgtaacaggtcatgtccn

SEQ ID NO: 411 - RNA, 19 nt, synthetic construct
  source 1..19: mol_type = other RNA
ccgttgaagctgtagctct

SEQ ID NO: 412 - RNA, 19 nt, synthetic construct
  source 1..19: mol_type = other RNA
tcgttgaagctgtagctct

SEQ ID NO: 413 - RNA, 19 nt, synthetic construct
  source 1..19: mol_type = other RNA
ncgttgaagctgtagctct

SEQ ID NO: 414 - RNA, 19 nt, synthetic construct
  source 1..19: mol_type = other RNA
tcgttgaagctgtagctcn

SEQ ID NO: 415 - RNA, 19 nt, synthetic construct
  source 1..19: mol_type = other RNA
ncgttgaagctgtagctcn

SEQ ID NO: 416 - RNA, 19 nt, synthetic construct
  source 1..19: mol_type = other RNA
ccgttgaagctgtagctct

SEQ ID NO: 417 - RNA, 19 nt, synthetic construct
  source 1..19: mol_type = other RNA
tcgttgaagctgtagctct

SEQ ID NO: 418 - RNA, 19 nt, synthetic construct
  source 1..19: mol_type = other RNA
ncgttgaagctgtagctct

SEQ ID NO: 419 - RNA, 19 nt, synthetic construct
  source 1..19: mol_type = other RNA
tcgttgaagctgtagctcn

SEQ ID NO: 420 - RNA, 19 nt, synthetic construct
  source 1..19: mol_type = other RNA
ncgttgaagctgtagctcn

SEQ ID NO: 421 - RNA, 19 nt, synthetic construct
  source 1..19: mol_type = other RNA
cagtacagtgaaggcactg

SEQ ID NO: 422 - RNA, 19 nt, synthetic construct
  source 1..19: mol_type = other RNA
tagtacagtgaaggcactg

SEQ ID NO: 423 - RNA, 19 nt, synthetic construct
  source 1..19: mol_type = other RNA
tagtacagtgaaggcactn

SEQ ID NO: 424 - RNA, 19 nt, synthetic construct
  source 1..19: mol_type = other RNA
nagtacagtgaaggcactg

SEQ ID NO: 425 - RNA, 19 nt, synthetic construct
  source 1..19: mol_type = other RNA
nagtacagtgaaggcactn

SEQ ID NO: 426 - RNA, 19 nt, synthetic construct
  source 1..19: mol_type = other RNA
ctcgaagctgttcctgatg

SEQ ID NO: 427 - RNA, 19 nt, synthetic construct
  source 1..19: mol_type = other RNA
ttcgaagctgttcctgatg

SEQ ID NO: 428 - RNA, 19 nt, synthetic construct
  source 1..19: mol_type = other RNA
ttcgaagctgttcctgatn

SEQ ID NO: 429 - RNA, 19 nt, synthetic construct
  source 1..19: mol_type = other RNA
ntcgaagctgttcctgatg

SEQ ID NO: 430 - RNA, 19 nt, synthetic construct
  source 1..19: mol_type = other RNA
ntcgaagctgttcctgatn

SEQ ID NO: 431 - RNA, 19 nt, synthetic construct
  source 1..19: mol_type = other RNA
ctcgaagctgttcctgatg

SEQ ID NO: 432 - RNA, 19 nt, synthetic construct
  source 1..19: mol_type = other RNA
ttcgaagctgttcctgatg

SEQ ID NO: 433 - RNA, 19 nt, synthetic construct
  source 1..19: mol_type = other RNA
ttcgaagctgttcctgatn

SEQ ID NO: 434 - RNA, 19 nt, synthetic construct
  source 1..19: mol_type = other RNA
ntcgaagctgttcctgatg

SEQ ID NO: 435 - RNA, 19 nt, synthetic construct
  source 1..19: mol_type = other RNA
ntcgaagctgttcctgatn

SEQ ID NO: 436 - RNA, 19 nt, synthetic construct
  source 1..19: mol_type = other RNA
tcttgttcaggcaaatcag

SEQ ID NO: 437 - RNA, 19 nt, synthetic construct
  source 1..19: mol_type = other RNA
tcttgttcaggcaaatcan

SEQ ID NO: 438 - RNA, 19 nt, synthetic construct
  source 1..19: mol_type = other RNA
ncttgttcaggcaaatcag

SEQ ID NO: 439 - RNA, 19 nt, synthetic construct
  source 1..19: mol_type = other RNA
ncttgttcaggcaaatcan

SEQ ID NO: 440 - RNA, 19 nt, synthetic construct
  source 1..19: mol_type = other RNA
tcaccaaagtggttgtcct

SEQ ID NO: 441 - RNA, 19 nt, synthetic construct
  source 1..19: mol_type = other RNA
tcaccaaagtggttgtccn

SEQ ID NO: 442 - RNA, 19 nt, synthetic construct
  source 1..19: mol_type = other RNA
ncaccaaagtggttgtcct

SEQ ID NO: 443 - RNA, 19 nt, synthetic construct
  source 1..19: mol_type = other RNA
ncaccaaagtggttgtccn

SEQ ID NO: 444 - RNA, 19 nt, synthetic construct
  source 1..19: mol_type = other RNA
tcaccaaagtggttgtcct

SEQ ID NO: 445 - RNA, 19 nt, synthetic construct
  source 1..19: mol_type = other RNA
tcaccaaagtggttgtccn

SEQ ID NO: 446 - RNA, 19 nt, synthetic construct
  source 1..19: mol_type = other RNA
ncaccaaagtggttgtcct

SEQ ID NO: 447 - RNA, 19 nt, synthetic construct
  source 1..19: mol_type = other RNA
ncaccaaagtggttgtccn

SEQ ID NO: 448 - RNA, 19 nt, synthetic construct
  source 1..19: mol_type = other RNA
gagcagaggttgttctggt

SEQ ID NO: 449 - RNA, 19 nt, synthetic construct
  source 1..19: mol_type = other RNA
tagcagaggttgttctggt

SEQ ID NO: 450 - RNA, 19 nt, synthetic construct
  source 1..19: mol_type = other RNA
tagcagaggttgttctggn

SEQ ID NO: 451 - RNA, 19 nt, synthetic construct
  source 1..19: mol_type = other RNA
nagcagaggttgttctggt

SEQ ID NO: 452 - RNA, 19 nt, synthetic construct
  source 1..19: mol_type = other RNA
nagcagaggttgttctggn

SEQ ID NO: 453 - RNA, 19 nt, synthetic construct
  source 1..19: mol_type = other RNA
gagcagaggttgttctggt

SEQ ID NO: 454 - RNA, 19 nt, synthetic construct
  source 1..19: mol_type = other RNA
tagcagaggttgttctggt

SEQ ID NO: 455 - RNA, 19 nt, synthetic construct
  source 1..19: mol_type = other RNA
tagcagaggttgttctggn

SEQ ID NO: 456 - RNA, 19 nt, synthetic construct
  source 1..19: mol_type = other RNA
nagcagaggttgttctggt

SEQ ID NO: 457 - RNA, 19 nt, synthetic construct
  source 1..19: mol_type = other RNA
nagcagaggttgttctggn

SEQ ID NO: 458 - RNA, 19 nt, synthetic construct
  source 1..19: mol_type = other RNA
tagattgtgctggttgtag

SEQ ID NO: 459 - RNA, 19 nt, synthetic construct
  source 1..19: mol_type = other RNA
tagattgtgctggttgtag

SEQ ID NO: 460 - RNA, 19 nt, synthetic construct
  source 1..19: mol_type = other RNA
nagattgtgctggttgtag

SEQ ID NO: 461 - RNA, 19 nt, synthetic construct
  source 1..19: mol_type = other RNA
tagattgtgctggttgtan

SEQ ID NO: 462 - RNA, 19 nt, synthetic construct
  source 1..19: mol_type = other RNA
nagattgtgctggttgtan

SEQ ID NO: 463 - RNA, 19 nt, synthetic construct
  source 1..19: mol_type = other RNA
cagaagttgtgctggttgt

SEQ ID NO: 464 - RNA, 19 nt, synthetic construct
  source 1..19: mol_type = other RNA
tagaagttgtgctggttgt

SEQ ID NO: 465 - RNA, 19 nt, synthetic construct
  source 1..19: mol_type = other RNA
nagaagttgtgctggttgt

SEQ ID NO: 466 - RNA, 19 nt, synthetic construct
  source 1..19: mol_type = other RNA
tagaagttgtgctggttgn

SEQ ID NO: 467 - RNA, 19 nt, synthetic construct
  source 1..19: mol_type = other RNA
nagaagttgtgctggttgn

SEQ ID NO: 468 - RNA, 19 nt, synthetic construct
  source 1..19: mol_type = other RNA
cttgtcaccaaagtggttg

SEQ ID NO: 469 - RNA, 19 nt, synthetic construct
  source 1..19: mol_type = other RNA
tttgtcaccaaagtggttg

SEQ ID NO: 470 - RNA, 19 nt, synthetic construct
  source 1..19: mol_type = other RNA
nttgtcaccaaagtggttg

SEQ ID NO: 471 - RNA, 19 nt, synthetic construct
  source 1..19: mol_type = other RNA
tttgtcaccaaagtggttn

SEQ ID NO: 472 - RNA, 19 nt, synthetic construct
  source 1..19: mol_type = other RNA
nttgtcaccaaagtggttn

SEQ ID NO: 473 - RNA, 19 nt, synthetic construct
  source 1..19: mol_type = other RNA
cagaggttgtgttggttgt

SEQ ID NO: 474 - RNA, 19 nt, synthetic construct
  source 1..19: mol_type = other RNA
tagaggttgtgttggttgt

SEQ ID NO: 475 - RNA, 19 nt, synthetic construct
  source 1..19: mol_type = other RNA
nagaggttgtgttggttgt

SEQ ID NO: 476 - RNA, 19 nt, synthetic construct
  source 1..19: mol_type = other RNA
tagaggttgtgttggttgn

SEQ ID NO: 477 - RNA, 19 nt, synthetic construct
  source 1..19: mol_type = other RNA
nagaggttgtgttggttgn

SEQ ID NO: 478 - RNA, 19 nt, synthetic construct
  source 1..19: mol_type = other RNA
tctagttgtaggagcagag

SEQ ID NO: 479 - RNA, 19 nt, synthetic construct
  source 1..19: mol_type = other RNA
gctagttgtaggagcagag

SEQ ID NO: 480 - RNA, 19 nt, synthetic construct
  source 1..19: mol_type = other RNA
nctagttgtaggagcagag

SEQ ID NO: 481 - RNA, 19 nt, synthetic construct
  source 1..19: mol_type = other RNA
tctagttgtaggagcagan

SEQ ID NO: 482 - RNA, 19 nt, synthetic construct
  source 1..19: mol_type = other RNA
nctagttgtaggagcagan

SEQ ID NO: 483 - RNA, 19 nt, synthetic construct
  source 1..19: mol_type = other RNA
tggttcaggaacacttccc

SEQ ID NO: 484 - RNA, 19 nt, synthetic construct
  source 1..19: mol_type = other RNA
nggttcaggaacacttccc

SEQ ID NO: 485 - RNA, 19 nt, synthetic construct
  source 1..19: mol_type = other RNA
tggttcaggaacacttccn

SEQ ID NO: 486 - RNA, 19 nt, synthetic construct
  source 1..19: mol_type = other RNA
nggttcaggaacacttccn

SEQ ID NO: 487 - RNA, 19 nt, synthetic construct
  source 1..19: mol_type = other RNA
tggttcaggaacacttccc

SEQ ID NO: 488 - RNA, 19 nt, synthetic construct
  source 1..19: mol_type = other RNA
nggttcaggaacacttccc

SEQ ID NO: 489 - RNA, 19 nt, synthetic construct
  source 1..19: mol_type = other RNA
tggttcaggaacacttccn

SEQ ID NO: 490 - RNA, 19 nt, synthetic construct
  source 1..19: mol_type = other RNA
nggttcaggaacacttccn

SEQ ID NO: 491 - RNA, 19 nt, synthetic construct
  source 1..19: mol_type = other RNA
gatgtcgtcgaagttccca

SEQ ID NO: 492 - RNA, 19 nt, synthetic construct
  source 1..19: mol_type = other RNA
tatgtcgtcgaagttccca

SEQ ID NO: 493 - RNA, 19 nt, synthetic construct
  source 1..19: mol_type = other RNA
natgtcgtcgaagttccca

SEQ ID NO: 494 - RNA, 19 nt, synthetic construct
  source 1..19: mol_type = other RNA
tatgtcgtcgaagttcccn

SEQ ID NO: 495 - RNA, 19 nt, synthetic construct
  source 1..19: mol_type = other RNA
natgtcgtcgaagttcccn

SEQ ID NO: 496 - RNA, 19 nt, synthetic construct
  source 1..19: mol_type = other RNA
gatgtcgtcgaagttccca

SEQ ID NO: 497 - RNA, 19 nt, synthetic construct
  source 1..19: mol_type = other RNA
tatgtcgtcgaagttccca

SEQ ID NO: 498 - RNA, 19 nt, synthetic construct
  source 1..19: mol_type = other RNA
natgtcgtcgaagttccca

SEQ ID NO: 499 - RNA, 19 nt, synthetic construct
  source 1..19: mol_type = other RNA
tatgtcgtcgaagttcccn

SEQ ID NO: 500 - RNA, 19 nt, synthetic construct
  source 1..19: mol_type = other RNA
natgtcgtcgaagttcccn

SEQ ID NO: 501 - RNA, 19 nt, synthetic construct
  source 1..19: mol_type = other RNA
atttctgccaagaggaggt

SEQ ID NO: 502 - RNA, 19 nt, synthetic construct
  source 1..19: mol_type = other RNA
atttctgccaagaggaggn

SEQ ID NO: 503 - RNA, 19 nt, synthetic construct
  source 1..19: mol_type = other RNA
ttttctgccaagaggaggt

SEQ ID NO: 504 - RNA, 19 nt, synthetic construct
  source 1..19: mol_type = other RNA
ttttctgccaagaggaggn

SEQ ID NO: 505 - RNA, 19 nt, synthetic construct
  source 1..19: mol_type = other RNA
ntttctgccaagaggaggn

SEQ ID NO: 506 - RNA, 19 nt, synthetic construct
  source 1..19: mol_type = other RNA
atttctgccaagaggaggt

SEQ ID NO: 507 - RNA, 19 nt, synthetic construct
  source 1..19: mol_type = other RNA
atttctgccaagaggaggn

SEQ ID NO: 508 - RNA, 19 nt, synthetic construct
  source 1..19: mol_type = other RNA
ttttctgccaagaggaggt

SEQ ID NO: 509 - RNA, 19 nt, synthetic construct
  source 1..19: mol_type = other RNA
ttttctgccaagaggaggn

SEQ ID NO: 510 - RNA, 19 nt, synthetic construct
  source 1..19: mol_type = other RNA
ntttctgccaagaggaggn

SEQ ID NO: 511 - RNA, 19 nt, synthetic construct
  source 1..19: mol_type = other RNA
tgttgttgaagatgatctc

SEQ ID NO: 512 - RNA, 19 nt, synthetic construct
  source 1..19: mol_type = other RNA
tgttgttgaagatgatctn

SEQ ID NO: 513 - RNA, 19 nt, synthetic construct
  source 1..19: mol_type = other RNA
ngttgttgaagatgatctc

SEQ ID NO: 514 - RNA, 19 nt, synthetic construct
  source 1..19: mol_type = other RNA
ngttgttgaagatgatctn

SEQ ID NO: 515 - RNA, 19 nt, synthetic construct
  source 1..19: mol_type = other RNA
tgttgttgtaggtttcctt

SEQ ID NO: 516 - RNA, 19 nt, synthetic construct
  source 1..19: mol_type = other RNA
ngttgttgtaggtttcctt

SEQ ID NO: 517 - RNA, 19 nt, synthetic construct
  source 1..19: mol_type = other RNA
tgttgttgtaggtttcctn

SEQ ID NO: 518 - RNA, 19 nt, synthetic construct
  source 1..19: mol_type = other RNA
ngttgttgtaggtttcctn

SEQ ID NO: 519 - RNA, 19 nt, synthetic construct
  source 1..19: mol_type = other RNA
atcttgtcctcatcaaaga

SEQ ID NO: 520 - RNA, 19 nt, synthetic construct
  source 1..19: mol_type = other RNA
atcttgtcctcatcaaagn

SEQ ID NO: 521 - RNA, 19 nt, synthetic construct
  source 1..19: mol_type = other RNA
ntcttgtcctcatcaaagn

SEQ ID NO: 522 - RNA, 19 nt, synthetic construct
  source 1..19: mol_type = other RNA
ttcttgtcctcatcaaaga

SEQ ID NO: 523 - RNA, 19 nt, synthetic construct
  source 1..19: mol_type = other RNA
ttcttgtcctcatcaaagn

SEQ ID NO: 524 - RNA, 19 nt, synthetic construct
  source 1..19: mol_type = other RNA
gcatcttgtcctcatcaaa

SEQ ID NO: 525 - RNA, 19 nt, synthetic construct
  source 1..19: mol_type = other RNA
tcatcttgtcctcatcaaa

SEQ ID NO: 526 - RNA, 19 nt, synthetic construct
  source 1..19: mol_type = other RNA
tcatcttgtcctcatcaan

SEQ ID NO: 527 - RNA, 19 nt, synthetic construct
  source 1..19: mol_type = other RNA
ncatcttgtcctcatcaaa

SEQ ID NO: 528 - RNA, 19 nt, synthetic construct
  source 1..19: mol_type = other RNA
ncatcttgtcctcatcaan

SEQ ID NO: 529 - RNA, 19 nt, synthetic construct
  source 1..19: mol_type = other RNA
gctagttgtaggagcagag

SEQ ID NO: 530 - RNA, 19 nt, synthetic construct
  source 1..19: mol_type = other RNA
tctagttgtaggagcagag

SEQ ID NO: 531 - RNA, 19 nt, synthetic construct
  source 1..19: mol_type = other RNA
nctagttgtaggagcagag

SEQ ID NO: 532 - RNA, 19 nt, synthetic construct
  source 1..19: mol_type = other RNA
tctagttgtaggagcagan

SEQ ID NO: 533 - RNA, 19 nt, synthetic construct
  source 1..19: mol_type = other RNA
nctagttgtaggagcagan

SEQ ID NO: 534 - RNA, 19 nt, synthetic construct
  source 1..19: mol_type = other RNA
tagttgtagaagcagaggt

SEQ ID NO: 535 - RNA, 19 nt, synthetic construct
  source 1..19: mol_type = other RNA
nagttgtagaagcagaggt

SEQ ID NO: 536 - RNA, 19 nt, synthetic construct
  source 1..19: mol_type = other RNA
tagttgtagaagcagaggn

SEQ ID NO: 537 - RNA, 19 nt, synthetic construct
  source 1..19: mol_type = other RNA
nagttgtagaagcagaggn

SEQ ID NO: 538 - RNA, 19 nt, synthetic construct
  source 1..19: mol_type = other RNA
cagaagttgtgctggttat

SEQ ID NO: 539 - RNA, 19 nt, synthetic construct
  source 1..19: mol_type = other RNA
tagaagttgtgctggttat

SEQ ID NO: 540 - RNA, 19 nt, synthetic construct
  source 1..19: mol_type = other RNA
nagaagttgtgctggttat

SEQ ID NO: 541 - RNA, 19 nt, synthetic construct
  source 1..19: mol_type = other RNA
tagaagttgtgctggttan

SEQ ID NO: 542 - RNA, 19 nt, synthetic construct
  source 1..19: mol_type = other RNA
nagaagttgtgctggttan

SEQ ID NO: 543 - RNA, 19 nt, synthetic construct
  source 1..19: mol_type = other RNA
ccaacactgcaggtgatgt

SEQ ID NO: 544 - RNA, 19 nt, synthetic construct
  source 1..19: mol_type = other RNA
tcaacactgcaggtgatgt

SEQ ID NO: 545 - RNA, 19 nt, synthetic construct
  source 1..19: mol_type = other RNA
ncaacactgcaggtgatgt

SEQ ID NO: 546 - RNA, 19 nt, synthetic construct
  source 1..19: mol_type = other RNA
tcaacactgcaggtgatgn

SEQ ID NO: 547 - RNA, 19 nt, synthetic construct
  source 1..19: mol_type = other RNA
ncaacactgcaggtgatgn

SEQ ID NO: 548 - RNA, 19 nt, synthetic construct
  source 1..19: mol_type = other RNA
ccaacactgcaggtgatgt

SEQ ID NO: 549 - RNA, 19 nt, synthetic construct
  source 1..19: mol_type = other RNA
tcaacactgcaggtgatgt

SEQ ID NO: 550 - RNA, 19 nt, synthetic construct
  source 1..19: mol_type = other RNA
ncaacactgcaggtgatgt

SEQ ID NO: 551 - RNA, 19 nt, synthetic construct
  source 1..19: mol_type = other RNA
tcaacactgcaggtgatgn

SEQ ID NO: 552 - RNA, 19 nt, synthetic construct
  source 1..19: mol_type = other RNA
ncaacactgcaggtgatgn

SEQ ID NO: 553 - RNA, 19 nt, synthetic construct
  source 1..19: mol_type = other RNA
catcttgtcctcatcaaag

SEQ ID NO: 554 - RNA, 19 nt, synthetic construct
  source 1..19: mol_type = other RNA
tatcttgtcctcatcaaag

SEQ ID NO: 555 - RNA, 19 nt, synthetic construct
  source 1..19: mol_type = other RNA
natcttgtcctcatcaaag

SEQ ID NO: 556 - RNA, 19 nt, synthetic construct
  source 1..19: mol_type = other RNA
tatcttgtcctcatcaaan

SEQ ID NO: 557 - RNA, 19 nt, synthetic construct
  source 1..19: mol_type = other RNA
natcttgtcctcatcaaan

SEQ ID NO: 558 - RNA, 19 nt, synthetic construct
  source 1..19: mol_type = other RNA
gtcgtgtggtagatgacgt

SEQ ID NO: 559 - RNA, 19 nt, synthetic construct
  source 1..19: mol_type = other RNA
ttcgtgtggtagatgacgt

SEQ ID NO: 560 - RNA, 19 nt, synthetic construct
  source 1..19: mol_type = other RNA
ntcgtgtggtagatgacgt

SEQ ID NO: 561 - RNA, 19 nt, synthetic construct
  source 1..19: mol_type = other RNA
ttcgtgtggtagatgacgn

SEQ ID NO: 562 - RNA, 19 nt, synthetic construct
  source 1..19: mol_type = other RNA
ntcgtgtggtagatgacgn

SEQ ID NO: 563 - RNA, 19 nt, synthetic construct
  source 1..19: mol_type = other RNA
gtcgtgtggtagatgacgt

SEQ ID NO: 564 - RNA, 19 nt, synthetic construct
  source 1..19: mol_type = other RNA
ttcgtgtggtagatgacgt

SEQ ID NO: 565 - RNA, 19 nt, synthetic construct
  source 1..19: mol_type = other RNA
ntcgtgtggtagatgacgt

SEQ ID NO: 566 - RNA, 19 nt, synthetic construct
  source 1..19: mol_type = other RNA
ttcgtgtggtagatgacgn

SEQ ID NO: 567 - RNA, 19 nt, synthetic construct
  source 1..19: mol_type = other RNA
ntcgtgtggtagatgacgn

SEQ ID NO: 568 - RNA, 19 nt, synthetic construct
  source 1..19: mol_type = other RNA
tgttctgcgactactacaa

SEQ ID NO: 569 - RNA, 19 nt, synthetic construct
  source 1..19: mol_type = other RNA
tgttctgcgactactacan

SEQ ID NO: 570 - RNA, 19 nt, synthetic construct
  source 1..19: mol_type = other RNA
ngttctgcgactactacaa

SEQ ID NO: 571 - RNA, 19 nt, synthetic construct
  source 1..19: mol_type = other RNA
ngttctgcgactactacan

SEQ ID NO: 572 - RNA, 19 nt, synthetic construct
  source 1..19: mol_type = other RNA
tgatttgcctgaacaagaa

SEQ ID NO: 573 - RNA, 19 nt, synthetic construct
  source 1..19: mol_type = other RNA
tgatttgcctgaacaagan

SEQ ID NO: 574 - RNA, 19 nt, synthetic construct
  source 1..19: mol_type = other RNA
ngatttgcctgaacaagaa

SEQ ID NO: 575 - RNA, 19 nt, synthetic construct
  source 1..19: mol_type = other RNA
ngatttgcctgaacaagan

SEQ ID NO: 576 - RNA, 19 nt, synthetic construct
  source 1..19: mol_type = other RNA
ctgctccaaggccatcaag

SEQ ID NO: 577 - RNA, 19 nt, synthetic construct
  source 1..19: mol_type = other RNA
ctgctccaaggccatcaaa

SEQ ID NO: 578 - RNA, 19 nt, synthetic construct
  source 1..19: mol_type = other RNA
ctgctccaaggccatcaan

SEQ ID NO: 579 - RNA, 19 nt, synthetic construct
  source 1..19: mol_type = other RNA
ntgctccaaggccatcaaa

SEQ ID NO: 580 - RNA, 19 nt, synthetic construct
  source 1..19: mol_type = other RNA
ntgctccaaggccatcaan

SEQ ID NO: 581 - RNA, 19 nt, synthetic construct
  source 1..19: mol_type = other RNA
ctccaaggccatcaagatt

SEQ ID NO: 582 - RNA, 19 nt, synthetic construct
  source 1..19: mol_type = other RNA
ntccaaggccatcaagatt

SEQ ID NO: 583 - RNA, 19 nt, synthetic construct
  source 1..19: mol_type = other RNA
ctccaaggccatcaagata

SEQ ID NO: 584 - RNA, 19 nt, synthetic construct
  source 1..19: mol_type = other RNA
ntccaaggccatcaagata

SEQ ID NO: 585 - RNA, 19 nt, synthetic construct
  source 1..19: mol_type = other RNA
ctccaaggccatcaagatn

SEQ ID NO: 586 - RNA, 19 nt, synthetic construct
  source 1..19: mol_type = other RNA
ntccaaggccatcaagatn

SEQ ID NO: 587 - RNA, 19 nt, synthetic construct
  source 1..19: mol_type = other RNA
cctcagccccgagttcaag

SEQ ID NO: 588 - RNA, 19 nt, synthetic construct
  source 1..19: mol_type = other RNA
cctcagccccgagttcaaa

SEQ ID NO: 589 - RNA, 19 nt, synthetic construct
  source 1..19: mol_type = other RNA
cctcagccccgagttcaan

SEQ ID NO: 590 - RNA, 19 nt, synthetic construct
  source 1..19: mol_type = other RNA
nctcagccccgagttcaaa

SEQ ID NO: 591 - RNA, 19 nt, synthetic construct
  source 1..19: mol_type = other RNA
nctcagccccgagttcaan

SEQ ID NO: 592 - RNA, 19 nt, synthetic construct
  source 1..19: mol_type = other RNA
cagaagcagtgcagcatcc

SEQ ID NO: 593 - RNA, 19 nt, synthetic construct
  source 1..19: mol_type = other RNA
cagaagcagtgcagcatca

SEQ ID NO: 594 - RNA, 19 nt, synthetic construct
  source 1..19: mol_type = other RNA
cagaagcagtgcagcatcn

SEQ ID NO: 595 - RNA, 19 nt, synthetic construct
  source 1..19: mol_type = other RNA
nagaagcagtgcagcatca

SEQ ID NO: 596 - RNA, 19 nt, synthetic construct
  source 1..19: mol_type = other RNA
nagaagcagtgcagcatcn

SEQ ID NO: 597 - RNA, 19 nt, synthetic construct
  modified_base 14: mod_base = i
  source 1..19: mol_type = other RNA
cagaagcagtgcancatca

SEQ ID NO: 598 - RNA, 19 nt, synthetic construct
  modified_base 14: mod_base = i
  source 1..19: mol_type = other RNA
nagaagcagtgcancatca

SEQ ID NO: 599 - RNA, 19 nt, synthetic construct
  modified_base 14: mod_base = i
  source 1..19: mol_type = other RNA
cagaagcagtgcancatcn

SEQ ID NO: 600 - RNA, 19 nt, synthetic construct
  modified_base 14: mod_base = i
  source 1..19: mol_type = other RNA
nagaagcagtgcancatcn

SEQ ID NO: 601 - RNA, 19 nt, synthetic construct
  source 1..19: mol_type = other RNA
ccctctgttctgcgactac

SEQ ID NO: 602 - RNA, 19 nt, synthetic construct
  source 1..19: mol_type = other RNA
ccctctgttctgcgactaa

SEQ ID NO: 603 - RNA, 19 nt, synthetic construct
  source 1..19: mol_type = other RNA
ncctctgttctgcgactaa

SEQ ID NO: 604 - RNA, 19 nt, synthetic construct
  source 1..19: mol_type = other RNA
ccctctgttctgcgactan

SEQ ID NO: 605 - RNA, 19 nt, synthetic construct
  source 1..19: mol_type = other RNA
ncctctgttctgcgactan

SEQ ID NO: 606 - RNA, 19 nt, synthetic construct
  modified_base 14: mod_base = i
  source 1..19: mol_type = other RNA
ccctctgttctgcnactaa

SEQ ID NO: 607 - RNA, 19 nt, synthetic construct
  modified_base 14: mod_base = i
  source 1..19: mol_type = other RNA
ncctctgttctgcnactaa

SEQ ID NO: 608 - RNA, 19 nt, synthetic construct
  modified_base 14: mod_base = i
  source 1..19: mol_type = other RNA
ccctctgttctgcnactan

SEQ ID NO: 609 - RNA, 19 nt, synthetic construct
  modified_base 14: mod_base = i
  source 1..19: mol_type = other RNA
ncctctgttctgcnactan

SEQ ID NO: 610 - RNA, 19 nt, synthetic construct
  source 1..19: mol_type = other RNA
cctctgttctgcgactact

SEQ ID NO: 611 - RNA, 19 nt, synthetic construct
  source 1..19: mol_type = other RNA
nctctgttctgcgactact

SEQ ID NO: 612 - RNA, 19 nt, synthetic construct
  source 1..19: mol_type = other RNA
cctctgttctgcgactaca

SEQ ID NO: 613 - RNA, 19 nt, synthetic construct
  source 1..19: mol_type = other RNA
nctctgttctgcgactaca

SEQ ID NO: 614 - RNA, 19 nt, synthetic construct
  source 1..19: mol_type = other RNA
cctctgttctgcgactacn

SEQ ID NO: 615 - RNA, 19 nt, synthetic construct
  source 1..19: mol_type = other RNA
nctctgttctgcgactacn

SEQ ID NO: 616 - RNA, 19 nt, synthetic construct
  modified_base 11: mod_base = i
  source 1..19: mol_type = other RNA
cctctgttctncgactact

SEQ ID NO: 617 - RNA, 19 nt, synthetic construct
  modified_base 11: mod_base = i
  source 1..19: mol_type = other RNA
nctctgttctncgactact

SEQ ID NO: 618 - RNA, 19 nt, synthetic construct
  modified_base 11: mod_base = i
  source 1..19: mol_type = other RNA
cctctgttctncgactaca

SEQ ID NO: 619 - RNA, 19 nt, synthetic construct
  modified_base 11: mod_base = i
  source 1..19: mol_type = other RNA
nctctgttctncgactaca

SEQ ID NO: 620 - RNA, 19 nt, synthetic construct
  modified_base 11: mod_base = i
  source 1..19: mol_type = other RNA
cctctgttctncgactacn

SEQ ID NO: 621 - RNA, 19 nt, synthetic construct
  modified_base 11: mod_base = i
  source 1..19: mol_type = other RNA
nctctgttctncgactacn

SEQ ID NO: 622 - RNA, 19 nt, synthetic construct
  source 1..19: mol_type = other RNA
tctgttctgcgactactac

SEQ ID NO: 623 - RNA, 19 nt, synthetic construct
  source 1..19: mol_type = other RNA
tctgttctgcgactactaa

SEQ ID NO: 624 - RNA, 19 nt, synthetic construct
  source 1..19: mol_type = other RNA
tctgttctgcgactactan

SEQ ID NO: 625 - RNA, 19 nt, synthetic construct
  source 1..19: mol_type = other RNA
nctgttctgcgactactan

SEQ ID NO: 626 - RNA, 19 nt, synthetic construct
  source 1..19: mol_type = other RNA
ctgttctgcgactactaca

SEQ ID NO: 627 - RNA, 19 nt, synthetic construct
  source 1..19: mol_type = other RNA
ctgttctgcgactactacn

SEQ ID NO: 628 - RNA, 19 nt, synthetic construct
  source 1..19: mol_type = other RNA
ntgttctgcgactactacn

SEQ ID NO: 629 - RNA, 19 nt, synthetic construct
  source 1..19: mol_type = other RNA
acccatctgctacaactat

SEQ ID NO: 630 - RNA, 19 nt, synthetic construct
  source 1..19: mol_type = other RNA
ncccatctgctacaactat

SEQ ID NO: 631 - RNA, 19 nt, synthetic construct
  source 1..19: mol_type = other RNA
acccatctgctacaactaa

SEQ ID NO: 632 - RNA, 19 nt, synthetic construct
  source 1..19: mol_type = other RNA
ncccatctgctacaactaa

SEQ ID NO: 633 - RNA, 19 nt, synthetic construct
  source 1..19: mol_type = other RNA
acccatctgctacaactan

SEQ ID NO: 634 - RNA, 19 nt, synthetic construct
  source 1..19: mol_type = other RNA
ncccatctgctacaactan

SEQ ID NO: 635 - RNA, 19 nt, synthetic construct
  source 1..19: mol_type = other RNA
aaagtggttcgacgtggac

SEQ ID NO: 636 - RNA, 19 nt, synthetic construct
  source 1..19: mol_type = other RNA
aaagtggttcgacgtggaa

SEQ ID NO: 637 - RNA, 19 nt, synthetic construct
  source 1..19: mol_type = other RNA
naagtggttcgacgtggaa

SEQ ID NO: 638 - RNA, 19 nt, synthetic construct
  source 1..19: mol_type = other RNA
aaagtggttcgacgtggan

SEQ ID NO: 639 - RNA, 19 nt, synthetic construct
  source 1..19: mol_type = other RNA
naagtggttcgacgtggan

SEQ ID NO: 640 - RNA, 19 nt, synthetic construct
  modified_base 14: mod_base = i
  source 1..19: mol_type = other RNA
aaagtggttcgacntggaa

SEQ ID NO: 641 - RNA, 19 nt, synthetic construct
  modified_base 14: mod_base = i
  source 1..19: mol_type = other RNA
naagtggttcgacntggaa

SEQ ID NO: 642 - RNA, 19 nt, synthetic construct
  modified_base 14: mod_base = i
  source 1..19: mol_type = other RNA
aaagtggttcgacntggan

SEQ ID NO: 643 - RNA, 19 nt, synthetic construct
  modified_base 14: mod_base = i
  source 1..19: mol_type = other RNA
naagtggttcgacntggan

SEQ ID NO: 644 - RNA, 19 nt, synthetic construct
  source 1..19: mol_type = other RNA
gtggttcgacgtggacttc

SEQ ID NO: 645 - RNA, 19 nt, synthetic construct
  source 1..19: mol_type = other RNA
gtggttcgacgtggactta

SEQ ID NO: 646 - RNA, 19 nt, synthetic construct
  source 1..19: mol_type = other RNA
ntggttcgacgtggactta

SEQ ID NO: 647 - RNA, 19 nt, synthetic construct
  source 1..19: mol_type = other RNA
gtggttcgacgtggacttn

SEQ ID NO: 648 - RNA, 19 nt, synthetic construct
  source 1..19: mol_type = other RNA
ntggttcgacgtggacttn

SEQ ID NO: 649 - RNA, 19 nt, synthetic construct
  modified_base 14: mod_base = i
  source 1..19: mol_type = other RNA
gtggttcgacgtgnactta

SEQ ID NO: 650 - RNA, 19 nt, synthetic construct
  modified_base 14: mod_base = i
  source 1..19: mol_type = other RNA
ntggttcgacgtgnactta

SEQ ID NO: 651 - RNA, 19 nt, synthetic construct
  modified_base 14: mod_base = i
  source 1..19: mol_type = other RNA
gtggttcgacgtgnacttn

SEQ ID NO: 652 - RNA, 19 nt, synthetic construct
  modified_base 14: mod_base = i
  source 1..19: mol_type = other RNA
ntggttcgacgtgnacttn

SEQ ID NO: 653 - RNA, 19 nt, synthetic construct
  source 1..19: mol_type = other RNA
ggttcgacgtggacttccc

SEQ ID NO: 654 - RNA, 19 nt, synthetic construct
  source 1..19: mol_type = other RNA
ggttcgacgtggacttcca

SEQ ID NO: 655 - RNA, 19 nt, synthetic construct
  source 1..19: mol_type = other RNA
ngttcgacgtggacttcca

SEQ ID NO: 656 - RNA, 19 nt, synthetic construct
  source 1..19: mol_type = other RNA
ggttcgacgtggacttccn

SEQ ID NO: 657 - RNA, 19 nt, synthetic construct
  source 1..19: mol_type = other RNA
ngttcgacgtggacttccn

SEQ ID NO: 658 - RNA, 19 nt, synthetic construct
  modified_base 12: mod_base = i
  source 1..19: mol_type = other RNA
ggttcgacgtgnacttcca

SEQ ID NO: 659 - RNA, 19 nt, synthetic construct
  modified_base 12: mod_base = i
  source 1..19: mol_type = other RNA
ngttcgacgtgnacttcca

SEQ ID NO: 660 - RNA, 19 nt, synthetic construct
  modified_base 12: mod_base = i
  source 1..19: mol_type = other RNA
ggttcgacgtgnacttccn

SEQ ID NO: 661 - RNA, 19 nt, synthetic construct
  modified_base 12: mod_base = i
  source 1..19: mol_type = other RNA
ngttcgacgtgnacttccn

SEQ ID NO: 662 - RNA, 19 nt, synthetic construct
  source 1..19: mol_type = other RNA
gacaagaagaccagcatct

SEQ ID NO: 663 - RNA, 19 nt, synthetic construct
  source 1..19: mol_type = other RNA
nacaagaagaccagcatct

SEQ ID NO: 664 - RNA, 19 nt, synthetic construct
  source 1..19: mol_type = other RNA
gacaagaagaccagcatca

SEQ ID NO: 665 - RNA, 19 nt, synthetic construct
  source 1..19: mol_type = other RNA
nacaagaagaccagcatca

SEQ ID NO: 666 - RNA, 19 nt, synthetic construct
  source 1..19: mol_type = other RNA
gacaagaagaccagcatcn

SEQ ID NO: 667 - RNA, 19 nt, synthetic construct
  source 1..19: mol_type = other RNA
nacaagaagaccagcatcn

SEQ ID NO: 668 - RNA, 19 nt, synthetic construct
  modified_base 14: mod_base = i
  source 1..19: mol_type = other RNA
gacaagaagaccancatct

SEQ ID NO: 669 - RNA, 19 nt, synthetic construct
  modified_base 14: mod_base = i
  source 1..19: mol_type = other RNA
nacaagaagaccancatct

SEQ ID NO: 670 - RNA, 19 nt, synthetic construct
  modified_base 14: mod_base = i
  source 1..19: mol_type = other RNA
gacaagaagaccancatca

SEQ ID NO: 671 - RNA, 19 nt, synthetic construct
  modified_base 14: mod_base = i
  source 1..19: mol_type = other RNA
nacaagaagaccancatca

SEQ ID NO: 672 - RNA, 19 nt, synthetic construct
  modified_base 14: mod_base = i
  source 1..19: mol_type = other RNA
gacaagaagaccancatcn

SEQ ID NO: 673 - RNA, 19 nt, synthetic construct
  modified_base 14: mod_base = i
  source 1..19: mol_type = other RNA
nacaagaagaccancatcn

SEQ ID NO: 674 - RNA, 19 nt, synthetic construct
  source 1..19: mol_type = other RNA
accagcatcttcatcaacc

SEQ ID NO: 675 - RNA, 19 nt, synthetic construct
  source 1..19: mol_type = other RNA
nccagcatcttcatcaacc

SEQ ID NO: 676 - RNA, 19 nt, synthetic construct
  source 1..19: mol_type = other RNA
accagcatcttcatcaacn

SEQ ID NO: 677 - RNA, 19 nt, synthetic construct
  source 1..19: mol_type = other RNA
nccagcatcttcatcaacn

SEQ ID NO: 678 - RNA, 19 nt, synthetic construct
  source 1..19: mol_type = other RNA
aggaaacctacaacaacat

SEQ ID NO: 679 - RNA, 19 nt, synthetic construct
  source 1..19: mol_type = other RNA
nggaaacctacaacaacat

SEQ ID NO: 680 - RNA, 19 nt, synthetic construct
  source 1..19: mol_type = other RNA
aggaaacctacaacaacaa

SEQ ID NO: 681 - RNA, 19 nt, synthetic construct
  source 1..19: mol_type = other RNA
nggaaacctacaacaacaa

SEQ ID NO: 682 - RNA, 19 nt, synthetic construct
  source 1..19: mol_type = other RNA
nggaaacctacaacaacan

SEQ ID NO: 683 - RNA, 19 nt, synthetic construct
  source 1..19: mol_type = other RNA
aaacctacaacaacatcat

SEQ ID NO: 684 - RNA, 19 nt, synthetic construct
  source 1..19: mol_type = other RNA
naacctacaacaacatcat

SEQ ID NO: 685 - RNA, 19 nt, synthetic construct
  source 1..19: mol_type = other RNA
aaacctacaacaacatcaa

SEQ ID NO: 686 - RNA, 19 nt, synthetic construct
  source 1..19: mol_type = other RNA
naacctacaacaacatcaa

SEQ ID NO: 687 - RNA, 19 nt, synthetic construct
  source 1..19: mol_type = other RNA
naacctacaacaacatcan

SEQ ID NO: 688 - RNA, 19 nt, synthetic construct
  source 1..19: mol_type = other RNA
agaccagcatcttcatcaa

SEQ ID NO: 689 - RNA, 19 nt, synthetic construct
  source 1..19: mol_type = other RNA
ngaccagcatcttcatcaa

SEQ ID NO: 690 - RNA, 19 nt, synthetic construct
  source 1..19: mol_type = other RNA
agaccagcatcttcatcan

SEQ ID NO: 691 - RNA, 19 nt, synthetic construct
  source 1..19: mol_type = other RNA
ngaccagcatcttcatcan

SEQ ID NO: 692 - RNA, 19 nt, synthetic construct
  source 1..19: mol_type = other RNA
tgctacaactaccagatca

SEQ ID NO: 693 - RNA, 19 nt, synthetic construct
  source 1..19: mol_type = other RNA
ngctacaactaccagatca

SEQ ID NO: 694 - RNA, 19 nt, synthetic construct
  source 1..19: mol_type = other RNA
tgctacaactaccagatcn

SEQ ID NO: 695 - RNA, 19 nt, synthetic construct
  source 1..19: mol_type = other RNA
ngctacaactaccagatcn

SEQ ID NO: 696 - RNA, 19 nt, synthetic construct
  modified_base 15: mod_base = i
  source 1..19: mol_type = other RNA
ngctacaactaccanatca

SEQ ID NO: 697 - RNA, 19 nt, synthetic construct
  modified_base 15: mod_base = i
  source 1..19: mol_type = other RNA
tgctacaactaccanatcn

SEQ ID NO: 698 - RNA, 19 nt, synthetic construct
  modified_base 15: mod_base = i
  source 1..19: mol_type = other RNA
ngctacaactaccanatcn

SEQ ID NO: 699 - RNA, 19 nt, synthetic construct
  modified_base 15: mod_base = i
  source 1..19: mol_type = other RNA
ngctacaactaccanatca

SEQ ID NO: 700 - RNA, 19 nt, synthetic construct
  source 1..19: mol_type = other RNA
tacaactaccagatcaggg

SEQ ID NO: 701 - RNA, 19 nt, synthetic construct
  source 1..19: mol_type = other RNA
tacaactaccagatcagga

SEQ ID NO: 702 - RNA, 19 nt, synthetic construct
  source 1..19: mol_type = other RNA
tacaactaccagatcaggn

SEQ ID NO: 703 - RNA, 19 nt, synthetic construct
  source 1..19: mol_type = other RNA
nacaactaccagatcagga

SEQ ID NO: 704 - RNA, 19 nt, synthetic construct
  source 1..19: mol_type = other RNA
nacaactaccagatcaggn

SEQ ID NO: 705 - RNA, 19 nt, synthetic construct
  modified_base 17: mod_base = i
  source 1..19: mol_type = other RNA
tacaactaccagatcangg

SEQ ID NO: 706 - RNA, 19 nt, synthetic construct
  modified_base 17: mod_base = i
  source 1..19: mol_type = other RNA
tacaactaccagatcanga

SEQ ID NO: 707 - RNA, 19 nt, synthetic construct
  modified_base 17: mod_base = i
  source 1..19: mol_type = other RNA
tacaactaccagatcangn

SEQ ID NO: 708 - RNA, 19 nt, synthetic construct
  modified_base 17: mod_base = i
  source 1..19: mol_type = other RNA
nacaactaccagatcanga

SEQ ID NO: 709 - RNA, 19 nt, synthetic construct
  modified_base 17: mod_base = i
  source 1..19: mol_type = other RNA
nacaactaccagatcangn

SEQ ID NO: 710 - RNA, 19 nt, synthetic construct
  source 1..19: mol_type = other RNA
cacccatctgctacaacta

SEQ ID NO: 711 - RNA, 19 nt, synthetic construct
  source 1..19: mol_type = other RNA
cacccatctgctacaactn

SEQ ID NO: 712 - RNA, 19 nt, synthetic construct
  source 1..19: mol_type = other RNA
nacccatctgctacaacta

SEQ ID NO: 713 - RNA, 19 nt, synthetic construct
  source 1..19: mol_type = other RNA
nacccatctgctacaactn

SEQ ID NO: 714 - RNA, 19 nt, synthetic construct
  source 1..19: mol_type = other RNA
gatccgcatccagtgttgc

SEQ ID NO: 715 - RNA, 19 nt, synthetic construct
  source 1..19: mol_type = other RNA
gatccgcatccagtgttga

SEQ ID NO: 716 - RNA, 19 nt, synthetic construct
  source 1..19: mol_type = other RNA
gatccgcatccagtgttga

SEQ ID NO: 717 - RNA, 19 nt, synthetic construct
  source 1..19: mol_type = other RNA
natccgcatccagtgttgn

SEQ ID NO: 718 - RNA, 19 nt, synthetic construct
  source 1..19: mol_type = other RNA
natccgcatccagtgttgn

SEQ ID NO: 719 - RNA, 19 nt, synthetic construct
  modified_base 15: mod_base = i
  source 1..19: mol_type = other RNA
gatccgcatccagtnttgc

SEQ ID NO: 720 - RNA, 19 nt, synthetic construct
  modified_base 15: mod_base = i
  source 1..19: mol_type = other RNA
gatccgcatccagtnttga

SEQ ID NO: 721 - RNA, 19 nt, synthetic construct
  modified_base 15: mod_base = i
  source 1..19: mol_type = other RNA
gatccgcatccagtnttga

SEQ ID NO: 722 - RNA, 19 nt, synthetic construct
  modified_base 15: mod_base = i
  source 1..19: mol_type = other RNA
natccgcatccagtnttgn

SEQ ID NO: 723 - RNA, 19 nt, synthetic construct
  modified_base 15: mod_base = i
  source 1..19: mol_type = other RNA
natccgcatccagtnttgn

SEQ ID NO: 724 - RNA, 19 nt, synthetic construct
  source 1..19: mol_type = other RNA
agaggtgagcatcgaacac

SEQ ID NO: 725 - RNA, 19 nt, synthetic construct
  source 1..19: mol_type = other RNA
agaggtgagcatcgaacaa

SEQ ID NO: 726 - RNA, 19 nt, synthetic construct
  source 1..19: mol_type = other RNA
agaggtgagcatcgaacan

SEQ ID NO: 727 - RNA, 19 nt, synthetic construct
  source 1..19: mol_type = other RNA
ngaggtgagcatcgaacaa

SEQ ID NO: 728 - RNA, 19 nt, synthetic construct
  source 1..19: mol_type = other RNA
ngaggtgagcatcgaacan

SEQ ID NO: 729 - RNA, 19 nt, synthetic construct
  modified_base 14: mod_base = i
  source 1..19: mol_type = other RNA
agaggtgagcatcnaacac

SEQ ID NO: 730 - RNA, 19 nt, synthetic construct
  modified_base 14: mod_base = i
  source 1..19: mol_type = other RNA
agaggtgagcatcnaacaa

SEQ ID NO: 731 - RNA, 19 nt, synthetic construct
  modified_base 14: mod_base = i
  source 1..19: mol_type = other RNA
agaggtgagcatcnaacan

SEQ ID NO: 732 - RNA, 19 nt, synthetic construct
  modified_base 14: mod_base = i
  source 1..19: mol_type = other RNA
ngaggtgagcatcnaacaa

SEQ ID NO: 733 - RNA, 19 nt, synthetic construct
  modified_base 14: mod_base = i
  source 1..19: mol_type = other RNA
ngaggtgagcatcnaacan

SEQ ID NO: 734 - RNA, 19 nt, synthetic construct
  source 1..19: mol_type = other RNA
gcagggacccttcaagatg

SEQ ID NO: 735 - RNA, 19 nt, synthetic construct
  source 1..19: mol_type = other RNA
gcagggacccttcaagata

SEQ ID NO: 736 - RNA, 19 nt, synthetic construct
  source 1..19: mol_type = other RNA
gcagggacccttcaagatn

SEQ ID NO: 737 - RNA, 19 nt, synthetic construct
  source 1..19: mol_type = other RNA
ncagggacccttcaagata

SEQ ID NO: 738 - RNA, 19 nt, synthetic construct
  source 1..19: mol_type = other RNA
ncagggacccttcaagatn

SEQ ID NO: 739 - RNA, 19 nt, synthetic construct
  source 1..19: mol_type = other RNA
agatgtgcctcaactacga

SEQ ID NO: 740 - RNA, 19 nt, synthetic construct
  source 1..19: mol_type = other RNA
agatgtgcctcaactacgn

SEQ ID NO: 741 - RNA, 19 nt, synthetic construct
  source 1..19: mol_type = other RNA
ngatgtgcctcaactacga

SEQ ID NO: 742 - RNA, 19 nt, synthetic construct
  source 1..19: mol_type = other RNA
ngatgtgcctcaactacgn

SEQ ID NO: 743 - RNA, 19 nt, synthetic construct
  modified_base 18: mod_base = i
  source 1..19: mol_type = other RNA
agatgtgcctcaactacna

SEQ ID NO: 744 - RNA, 19 nt, synthetic construct
  modified_base 18: mod_base = i
  source 1..19: mol_type = other RNA
agatgtgcctcaactacnn

SEQ ID NO: 745 - RNA, 19 nt, synthetic construct
  modified_base 18: mod_base = i
  source 1..19: mol_type = other RNA
ngatgtgcctcaactacna

SEQ ID NO: 746 - RNA, 19 nt, synthetic construct
  modified_base 18: mod_base = i
  source 1..19: mol_type = other RNA
ngatgtgcctcaactacnn

SEQ ID NO: 747 - RNA, 19 nt, synthetic construct
  source 1..19: mol_type = other RNA
atgtgcctcaactacgagg

SEQ ID NO: 748 - RNA, 19 nt, synthetic construct
  source 1..19: mol_type = other RNA
atgtgcctcaactacgaga

SEQ ID NO: 749 - RNA, 19 nt, synthetic construct
  source 1..19: mol_type = other RNA
atgtgcctcaactacgagn

SEQ ID NO: 750 - RNA, 19 nt, synthetic construct
  source 1..19: mol_type = other RNA
ntgtgcctcaactacgaga

SEQ ID NO: 751 - RNA, 19 nt, synthetic construct
  source 1..19: mol_type = other RNA
ntgtgcctcaactacgagn

SEQ ID NO: 752 - RNA, 19 nt, synthetic construct
  modified_base 16: mod_base = i
  source 1..19: mol_type = other RNA
atgtgcctcaactacnagg

SEQ ID NO: 753 - RNA, 19 nt, synthetic construct
  modified_base 16: mod_base = i
  source 1..19: mol_type = other RNA
atgtgcctcaactacnaga

SEQ ID NO: 754 - RNA, 19 nt, synthetic construct
  modified_base 16: mod_base = i
  source 1..19: mol_type = other RNA
atgtgcctcaactacnagn

SEQ ID NO: 755 - RNA, 19 nt, synthetic construct
  modified_base 16: mod_base = i
  source 1..19: mol_type = other RNA
ntgtgcctcaactacnaga

SEQ ID NO: 756 - RNA, 19 nt, synthetic construct
  modified_base 16: mod_base = i
  source 1..19: mol_type = other RNA
ntgtgcctcaactacnagn

SEQ ID NO: 757 - RNA, 19 nt, synthetic construct
  source 1..19: mol_type = other RNA
cagcgagacctgcctgaag

SEQ ID NO: 758 - RNA, 19 nt, synthetic construct
  source 1..19: mol_type = other RNA
cagcgagacctgcctgaaa

SEQ ID NO: 759 - RNA, 19 nt, synthetic construct
  source 1..19: mol_type = other RNA
cagcgagacctgcctgaan

SEQ ID NO: 760 - RNA, 19 nt, synthetic construct
  source 1..19: mol_type = other RNA
nagcgagacctgcctgaaa

SEQ ID NO: 761 - RNA, 19 nt, synthetic construct
  source 1..19: mol_type = other RNA
nagcgagacctgcctgaan

SEQ ID NO: 762 - RNA, 19 nt, synthetic construct
  source 1..19: mol_type = other RNA
aacgtcaccatcttcagac

SEQ ID NO: 763 - RNA, 19 nt, synthetic construct
  source 1..19: mol_type = other RNA
aacgtcaccatcttcagaa

SEQ ID NO: 764 - RNA, 19 nt, synthetic construct
  source 1..19: mol_type = other RNA
aacgtcaccatcttcagan

SEQ ID NO: 765 - RNA, 19 nt, synthetic construct
  source 1..19: mol_type = other RNA
nacgtcaccatcttcagaa

SEQ ID NO: 766 - RNA, 19 nt, synthetic construct
  source 1..19: mol_type = other RNA
nacgtcaccatcttcagan

SEQ ID NO: 767 - RNA, 19 nt, synthetic construct
  source 1..19: mol_type = other RNA
acgtcaccatcttcagacc

SEQ ID NO: 768 - RNA, 19 nt, synthetic construct
  source 1..19: mol_type = other RNA
acgtcaccatcttcagaca

SEQ ID NO: 769 - RNA, 19 nt, synthetic construct
  source 1..19: mol_type = other RNA
acgtcaccatcttcagacn

SEQ ID NO: 770 - RNA, 19 nt, synthetic construct
  source 1..19: mol_type = other RNA
ncgtcaccatcttcagaca

SEQ ID NO: 771 - RNA, 19 nt, synthetic construct
  source 1..19: mol_type = other RNA
ncgtcaccatcttcagacn

SEQ ID NO: 772 - RNA, 19 nt, synthetic construct
  modified_base 16: mod_base = i
  source 1..19: mol_type = other RNA
acgtcaccatcttcanacc

SEQ ID NO: 773 - RNA, 19 nt, synthetic construct
  modified_base 16: mod_base = i
  source 1..19: mol_type = other RNA
acgtcaccatcttcanaca

SEQ ID NO: 774 - RNA, 19 nt, synthetic construct
  modified_base 16: mod_base = i
  source 1..19: mol_type = other RNA
acgtcaccatcttcanacn

SEQ ID NO: 775 - RNA, 19 nt, synthetic construct
  modified_base 16: mod_base = i
  source 1..19: mol_type = other RNA
ncgtcaccatcttcanaca

SEQ ID NO: 776 - RNA, 19 nt, synthetic construct
  modified_base 16: mod_base = i
  source 1..19: mol_type = other RNA
ncgtcaccatcttcanacn

SEQ ID NO: 777 - RNA, 19 nt, synthetic construct
  source 1..19: mol_type = other RNA
tccaggccgatgacttccg

SEQ ID NO: 778 - RNA, 19 nt, synthetic construct
  source 1..19: mol_type = other RNA
tccaggccgatgacttcca

SEQ ID NO: 779 - RNA, 19 nt, synthetic construct
  source 1..19: mol_type = other RNA
tccaggccgatgacttccn

SEQ ID NO: 780 - RNA, 19 nt, synthetic construct
  source 1..19: mol_type = other RNA
nccaggccgatgacttcca

SEQ ID NO: 781 - RNA, 19 nt, synthetic construct
  source 1..19: mol_type = other RNA
nccaggccgatgacttccn

SEQ ID NO: 782 - RNA, 19 nt, synthetic construct
  source 1..19: mol_type = other RNA
cttcttcaacaccttcaag

SEQ ID NO: 783 - RNA, 19 nt, synthetic construct
  source 1..19: mol_type = other RNA
cttcttcaacaccttcaaa

SEQ ID NO: 784 - RNA, 19 nt, synthetic construct
  source 1..19: mol_type = other RNA
cttcttcaacaccttcaan

SEQ ID NO: 785 - RNA, 19 nt, synthetic construct
  source 1..19: mol_type = other RNA
nttcttcaacaccttcaaa

SEQ ID NO: 786 - RNA, 19 nt, synthetic construct
  source 1..19: mol_type = other RNA
nttcttcaacaccttcaan

SEQ ID NO: 787 - RNA, 19 nt, synthetic construct
  source 1..19: mol_type = other RNA
acctactactcgaactgca

SEQ ID NO: 788 - RNA, 19 nt, synthetic construct
  source 1..19: mol_type = other RNA
acctactactcgaactgcn

SEQ ID NO: 789 - RNA, 19 nt, synthetic construct
  source 1..19: mol_type = other RNA
ncctactactcgaactgca

SEQ ID NO: 790 - RNA, 19 nt, synthetic construct
  source 1..19: mol_type = other RNA
ncctactactcgaactgcn

SEQ ID NO: 791 - RNA, 19 nt, synthetic construct
  modified_base 17: mod_base = i
  source 1..19: mol_type = other RNA
acctactactcgaactnca

SEQ ID NO: 792 - RNA, 19 nt, synthetic construct
  modified_base 17: mod_base = i
  source 1..19: mol_type = other RNA
acctactactcgaactncn

SEQ ID NO: 793 - RNA, 19 nt, synthetic construct
  modified_base 17: mod_base = i
  source 1..19: mol_type = other RNA
ncctactactcgaactnca

SEQ ID NO: 794 - RNA, 19 nt, synthetic construct
  modified_base 17: mod_base = i
  source 1..19: mol_type = other RNA
ncctactactcgaactncn

SEQ ID NO: 795 - RNA, 19 nt, synthetic construct
  source 1..19: mol_type = other RNA
agggaccacctgctccaag

SEQ ID NO: 796 - RNA, 19 nt, synthetic construct
  source 1..19: mol_type = other RNA
agggaccacctgctccaaa

SEQ ID NO: 797 - RNA, 19 nt, synthetic construct
  source 1..19: mol_type = other RNA
agggaccacctgctccaan

SEQ ID NO: 798 - RNA, 19 nt, synthetic construct
  source 1..19: mol_type = other RNA
ngggaccacctgctccaaa

SEQ ID NO: 799 - RNA, 19 nt, synthetic construct
  source 1..19: mol_type = other RNA
ngggaccacctgctccaan

SEQ ID NO: 800 - RNA, 19 nt, synthetic construct
  source 1..19: mol_type = other RNA
tgctccaaggccatcaaga

SEQ ID NO: 801 - RNA, 19 nt, synthetic construct
  source 1..19: mol_type = other RNA
tgctccaaggccatcaagn

SEQ ID NO: 802 - RNA, 19 nt, synthetic construct
  source 1..19: mol_type = other RNA
ngctccaaggccatcaaga

SEQ ID NO: 803 - RNA, 19 nt, synthetic construct
  source 1..19: mol_type = other RNA
ngctccaaggccatcaagn

SEQ ID NO: 804 - RNA, 19 nt, synthetic construct
  source 1..19: mol_type = other RNA
tgtggaaccacgatgacag

SEQ ID NO: 805 - RNA, 19 nt, synthetic construct
  source 1..19: mol_type = other RNA
tgtggaaccacgatgacaa

SEQ ID NO: 806 - RNA, 19 nt, synthetic construct
  source 1..19: mol_type = other RNA
tgtggaaccacgatgacan

SEQ ID NO: 807 - RNA, 19 nt, synthetic construct
  source 1..19: mol_type = other RNA
ngtggaaccacgatgacaa

SEQ ID NO: 808 - RNA, 19 nt, synthetic construct
  source 1..19: mol_type = other RNA
ngtggaaccacgatgacan

SEQ ID NO: 809 - RNA, 19 nt, synthetic construct
  modified_base 15: mod_base = i
  source 1..19: mol_type = other RNA
tgtggaaccacgatnacag

SEQ ID NO: 810 - RNA, 19 nt, synthetic construct
  modified_base 15: mod_base = i
  source 1..19: mol_type = other RNA
tgtggaaccacgatnacaa

SEQ ID NO: 811 - RNA, 19 nt, synthetic construct
  modified_base 15: mod_base = i
  source 1..19: mol_type = other RNA
tgtggaaccacgatnacan

SEQ ID NO: 812 - RNA, 19 nt, synthetic construct
  modified_base 15: mod_base = i
  source 1..19: mol_type = other RNA
ngtggaaccacgatnacaa

SEQ ID NO: 813 - RNA, 19 nt, synthetic construct
  modified_base 15: mod_base = i
  source 1..19: mol_type = other RNA
ngtggaaccacgatnacan

SEQ ID NO: 814 - RNA, 19 nt, synthetic construct
  source 1..19: mol_type = other RNA
gcaagacctctgcttctgt

SEQ ID NO: 815 - RNA, 19 nt, synthetic construct
  source 1..19: mol_type = other RNA
ncaagacctctgcttctgt

SEQ ID NO: 816 - RNA, 19 nt, synthetic construct
  source 1..19: mol_type = other RNA
gcaagacctctgcttctga

SEQ ID NO: 817 - RNA, 19 nt, synthetic construct
  source 1..19: mol_type = other RNA
ncaagacctctgcttctga

SEQ ID NO: 818 - RNA, 19 nt, synthetic construct
  modified_base 18: mod_base = i
  source 1..19: mol_type = other RNA
gcaagacctctgcttctnt

SEQ ID NO: 819 - RNA, 19 nt, synthetic construct
  modified_base 18: mod_base = i
  source 1..19: mol_type = other RNA
ncaagacctctgcttctnt

SEQ ID NO: 820 - RNA, 19 nt, synthetic construct
  modified_base 18: mod_base = i
  source 1..19: mol_type = other RNA
gcaagacctctgcttctna

SEQ ID NO: 821 - RNA, 19 nt, synthetic construct
  modified_base 18: mod_base = i
  source 1..19: mol_type = other RNA
ncaagacctctgcttctna

SEQ ID NO: 822 - RNA, 19 nt, synthetic construct
  source 1..19: mol_type = other RNA
cacagactgcaccaactgc

SEQ ID NO: 823 - RNA, 19 nt, synthetic construct
  source 1..19: mol_type = other RNA
cacagactgcaccaactga

SEQ ID NO: 824 - RNA, 19 nt, synthetic construct
  source 1..19: mol_type = other RNA
cacagactgcaccaactga

SEQ ID NO: 825 - RNA, 19 nt, synthetic construct
  source 1..19: mol_type = other RNA
nacagactgcaccaactgn

SEQ ID NO: 826 - RNA, 19 nt, synthetic construct
  source 1..19: mol_type = other RNA
nacagactgcaccaactgn

SEQ ID NO: 827 - RNA, 19 nt, synthetic construct
  modified_base 18: mod_base = i
  source 1..19: mol_type = other RNA
cacagactgcaccaactnc

SEQ ID NO: 828 - RNA, 19 nt, synthetic construct
  modified_base 18: mod_base = i
  source 1..19: mol_type = other RNA
cacagactgcaccaactna

SEQ ID NO: 829 - RNA, 19 nt, synthetic construct
  modified_base 18: mod_base = i
  source 1..19: mol_type = other RNA
cacagactgcaccaactna

SEQ ID NO: 830 - RNA, 19 nt, synthetic construct
  modified_base 18: mod_base = i
  source 1..19: mol_type = other RNA
nacagactgcaccaactnn

SEQ ID NO: 831 - RNA, 19 nt, synthetic construct
  modified_base 18: mod_base = i
  source 1..19: mol_type = other RNA
nacagactgcaccaactnn

SEQ ID NO: 832 - RNA, 19 nt, synthetic construct
  source 1..19: mol_type = other RNA
agtgccttcactgtactgc

SEQ ID NO: 833 - RNA, 19 nt, synthetic construct
  source 1..19: mol_type = other RNA
agtgccttcactgtactga

SEQ ID NO: 834 - RNA, 19 nt, synthetic construct
  source 1..19: mol_type = other RNA
agtgccttcactgtactgn

SEQ ID NO: 835 - RNA, 19 nt, synthetic construct
  source 1..19: mol_type = other RNA
ngtgccttcactgtactga

SEQ ID NO: 836 - RNA, 19 nt, synthetic construct
  source 1..19: mol_type = other RNA
ngtgccttcactgtactgn

SEQ ID NO: 837 - RNA, 19 nt, synthetic construct
  modified_base 18: mod_base = i
  source 1..19: mol_type = other RNA
agtgccttcactgtactnc

SEQ ID NO: 838 - RNA, 19 nt, synthetic construct
  modified_base 18: mod_base = i
  source 1..19: mol_type = other RNA
agtgccttcactgtactna

SEQ ID NO: 839 - RNA, 19 nt, synthetic construct
  modified_base 18: mod_base = i
  source 1..19: mol_type = other RNA
agtgccttcactgtactnn

SEQ ID NO: 840 - RNA, 19 nt, synthetic construct
  modified_base 18: mod_base = i
  source 1..19: mol_type = other RNA
ngtgccttcactgtactna

SEQ ID NO: 841 - RNA, 19 nt, synthetic construct
  modified_base 18: mod_base = i
  source 1..19: mol_type = other RNA
ngtgccttcactgtactnn

SEQ ID NO: 842 - RNA, 19 nt, synthetic construct
  source 1..19: mol_type = other RNA
tgtgggaacttcaacagca

SEQ ID NO: 843 - RNA, 19 nt, synthetic construct
  source 1..19: mol_type = other RNA
tgtgggaacttcaacagcn

SEQ ID NO: 844 - RNA, 19 nt, synthetic construct
  source 1..19: mol_type = other RNA
ngtgggaacttcaacagca

SEQ ID NO: 845 - RNA, 19 nt, synthetic construct
  source 1..19: mol_type = other RNA
ngtgggaacttcaacagcn

SEQ ID NO: 846 - RNA, 19 nt, synthetic construct
  modified_base 17: mod_base = i
  source 1..19: mol_type = other RNA
tgtgggaacttcaacanca

SEQ ID NO: 847 - RNA, 19 nt, synthetic construct
  modified_base 17: mod_base = i
  source 1..19: mol_type = other RNA
tgtgggaacttcaacancn

SEQ ID NO: 848 - RNA, 19 nt, synthetic construct
  modified_base 17: mod_base = i
  source 1..19: mol_type = other RNA
ngtgggaacttcaacanca

SEQ ID NO: 849 - RNA, 19 nt, synthetic construct
  modified_base 17: mod_base = i
  source 1..19: mol_type = other RNA
ngtgggaacttcaacancn

SEQ ID NO: 850 - RNA, 19 nt, synthetic construct
  source 1..19: mol_type = other RNA
gggaacttcaacagcatcc

SEQ ID NO: 851 - RNA, 19 nt, synthetic construct
  source 1..19: mol_type = other RNA
gggaacttcaacagcatca

SEQ ID NO: 852 - RNA, 19 nt, synthetic construct
  source 1..19: mol_type = other RNA
gggaacttcaacagcatcn

SEQ ID NO: 853 - RNA, 19 nt, synthetic construct
  source 1..19: mol_type = other RNA
nggaacttcaacagcatca

SEQ ID NO: 854 - RNA, 19 nt, synthetic construct
  source 1..19: mol_type = other RNA
nggaacttcaacagcatcn

SEQ ID NO: 855 - RNA, 19 nt, synthetic construct
  modified_base 14: mod_base = i
  source 1..19: mol_type = other RNA
gggaacttcaacancatcc

SEQ ID NO: 856 - RNA, 19 nt, synthetic construct
  modified_base 14: mod_base = i
  source 1..19: mol_type = other RNA
gggaacttcaacancatca

SEQ ID NO: 857 - RNA, 19 nt, synthetic construct
  modified_base 14: mod_base = i
  source 1..19: mol_type = other RNA
gggaacttcaacancatcn

SEQ ID NO: 858 - RNA, 19 nt, synthetic construct
  modified_base 14: mod_base = i
  source 1..19: mol_type = other RNA
nggaacttcaacancatca

SEQ ID NO: 859 - RNA, 19 nt, synthetic construct
  modified_base 14: mod_base = i
  source 1..19: mol_type = other RNA
nggaacttcaacancatcn

SEQ ID NO: 860 - RNA, 19 nt, synthetic construct
  source 1..19: mol_type = other RNA
ttcaacaccttcaagaccc

SEQ ID NO: 861 - RNA, 19 nt, synthetic construct
  source 1..19: mol_type = other RNA
ttcaacaccttcaagacca

SEQ ID NO: 862 - RNA, 19 nt, synthetic construct
  source 1..19: mol_type = other RNA
ttcaacaccttcaagaccn

SEQ ID NO: 863 - RNA, 19 nt, synthetic construct
  source 1..19: mol_type = other RNA
ntcaacaccttcaagacca

SEQ ID NO: 864 - RNA, 19 nt, synthetic construct
  source 1..19: mol_type = other RNA
ntcaacaccttcaagaccn

SEQ ID NO: 865 - RNA, 19 nt, synthetic construct
  modified_base 15: mod_base = i
  source 1..19: mol_type = other RNA
ttcaacaccttcaanaccc

SEQ ID NO: 866 - RNA, 19 nt, synthetic construct
  modified_base 15: mod_base = i
  source 1..19: mol_type = other RNA
ttcaacaccttcaanacca

SEQ ID NO: 867 - RNA, 19 nt, synthetic construct
  modified_base 15: mod_base = i
  source 1..19: mol_type = other RNA
ttcaacaccttcaanaccn

SEQ ID NO: 868 - RNA, 19 nt, synthetic construct
  modified_base 15: mod_base = i
  source 1..19: mol_type = other RNA
ntcaacaccttcaanacca

SEQ ID NO: 869 - RNA, 19 nt, synthetic construct
  modified_base 15: mod_base = i
  source 1..19: mol_type = other RNA
ntcaacaccttcaanaccn

SEQ ID NO: 870 - RNA, 19 nt, synthetic construct
  source 1..19: mol_type = other RNA
ccaacatcaggaacagctt

SEQ ID NO: 871 - RNA, 19 nt, synthetic construct
  source 1..19: mol_type = other RNA
ncaacatcaggaacagctt

SEQ ID NO: 872 - RNA, 19 nt, synthetic construct
  source 1..19: mol_type = other RNA
ccaacatcaggaacagctn

SEQ ID NO: 873 - RNA, 19 nt, synthetic construct
  source 1..19: mol_type = other RNA
ncaacatcaggaacagctt

SEQ ID NO: 874 - RNA, 19 nt, synthetic construct
  source 1..19: mol_type = other RNA
ncaacatcaggaacagctn

SEQ ID NO: 875 - RNA, 19 nt, synthetic construct
  modified_base 16: mod_base = i
  source 1..19: mol_type = other RNA
ccaacatcaggaacanctt

SEQ ID NO: 876 - RNA, 19 nt, synthetic construct
  modified_base 16: mod_base = i
  source 1..19: mol_type = other RNA
ncaacatcaggaacanctt

SEQ ID NO: 877 - RNA, 19 nt, synthetic construct
  modified_base 16: mod_base = i
  source 1..19: mol_type = other RNA
ccaacatcaggaacanctn

SEQ ID NO: 878 - RNA, 19 nt, synthetic construct
  modified_base 16: mod_base = i
  source 1..19: mol_type = other RNA
ncaacatcaggaacanctt

SEQ ID NO: 879 - RNA, 19 nt, synthetic construct
  modified_base 16: mod_base = i
  source 1..19: mol_type = other RNA
ncaacatcaggaacanctn

SEQ ID NO: 880 - RNA, 19 nt, synthetic construct
  source 1..19: mol_type = other RNA
tactactcgaactgcatgt

SEQ ID NO: 881 - RNA, 19 nt, synthetic construct
  source 1..19: mol_type = other RNA
nactactcgaactgcatgt

SEQ ID NO: 882 - RNA, 19 nt, synthetic construct
  source 1..19: mol_type = other RNA
tactactcgaactgcatga

SEQ ID NO: 883 - RNA, 19 nt, synthetic construct
  source 1..19: mol_type = other RNA
nactactcgaactgcatga

SEQ ID NO: 884 - RNA, 19 nt, synthetic construct
  source 1..19: mol_type = other RNA
nactactcgaactgcatgn

SEQ ID NO: 885 - RNA, 19 nt, synthetic construct
  source 1..19: mol_type = other RNA
cacctgcagtgttggcttc

SEQ ID NO: 886 - RNA, 19 nt, synthetic construct
  source 1..19: mol_type = other RNA
cacctgcagtgttggctta

SEQ ID NO: 887 - RNA, 19 nt, synthetic construct
  source 1..19: mol_type = other RNA
cacctgcagtgttggcttn

SEQ ID NO: 888 - RNA, 19 nt, synthetic construct
  source 1..19: mol_type = other RNA
nacctgcagtgttggctta

SEQ ID NO: 889 - RNA, 19 nt, synthetic construct
  source 1..19: mol_type = other RNA
nacctgcagtgttggcttn

SEQ ID NO: 890 - RNA, 19 nt, synthetic construct
  modified_base 15: mod_base = i
  source 1..19: mol_type = other RNA
cacctgcagtgttgncttc

SEQ ID NO: 891 - RNA, 19 nt, synthetic construct
  modified_base 15: mod_base = i
  source 1..19: mol_type = other RNA
cacctgcagtgttgnctta

SEQ ID NO: 892 - RNA, 19 nt, synthetic construct
  modified_base 15: mod_base = i
  source 1..19: mol_type = other RNA
cacctgcagtgttgncttn

SEQ ID NO: 893 - RNA, 19 nt, synthetic construct
  modified_base 15: mod_base = i
  source 1..19: mol_type = other RNA
nacctgcagtgttgnctta

SEQ ID NO: 894 - RNA, 19 nt, synthetic construct
  modified_base 15: mod_base = i
  source 1..19: mol_type = other RNA
nacctgcagtgttgncttn

SEQ ID NO: 895 - RNA, 19 nt, synthetic construct
  source 1..19: mol_type = other RNA
tggacatgacctgttacag

SEQ ID NO: 896 - RNA, 19 nt, synthetic construct
  source 1..19: mol_type = other RNA
tggacatgacctgttacaa

SEQ ID NO: 897 - RNA, 19 nt, synthetic construct
  source 1..19: mol_type = other RNA
tggacatgacctgttacan

SEQ ID NO: 898 - RNA, 19 nt, synthetic construct
  source 1..19: mol_type = other RNA
nggacatgacctgttacaa

SEQ ID NO: 899 - RNA, 19 nt, synthetic construct
  source 1..19: mol_type = other RNA
nggacatgacctgttacan

SEQ ID NO: 900 - RNA, 19 nt, synthetic construct
  source 1..19: mol_type = other RNA
agagctacagcttcaacgg

SEQ ID NO: 901 - RNA, 19 nt, synthetic construct
  source 1..19: mol_type = other RNA
agagctacagcttcaacga

SEQ ID NO: 902 - RNA, 19 nt, synthetic construct
  source 1..19: mol_type = other RNA
agagctacagcttcaacgn

SEQ ID NO: 903 - RNA, 19 nt, synthetic construct
  source 1..19: mol_type = other RNA
ngagctacagcttcaacga

SEQ ID NO: 904 - RNA, 19 nt, synthetic construct
  source 1..19: mol_type = other RNA
ngagctacagcttcaacgn

SEQ ID NO: 905 - RNA, 19 nt, synthetic construct
  modified_base 18: mod_base = i
  source 1..19: mol_type = other RNA
agagctacagcttcaacng

SEQ ID NO: 906 - RNA, 19 nt, synthetic construct
  modified_base 18: mod_base = i
  source 1..19: mol_type = other RNA
agagctacagcttcaacna

SEQ ID NO: 907 - RNA, 19 nt, synthetic construct
  modified_base 18: mod_base = i
  source 1..19: mol_type = other RNA
agagctacagcttcaacnn

SEQ ID NO: 908 - RNA, 19 nt, synthetic construct
  modified_base 18: mod_base = i
  source 1..19: mol_type = other RNA
ngagctacagcttcaacna

SEQ ID NO: 909 - RNA, 19 nt, synthetic construct
  modified_base 18: mod_base = i
  source 1..19: mol_type = other RNA
ngagctacagcttcaacnn

SEQ ID NO: 910 - RNA, 19 nt, synthetic construct
  source 1..19: mol_type = other RNA
cagtgccttcactgtactg

SEQ ID NO: 911 - RNA, 19 nt, synthetic construct
  source 1..19: mol_type = other RNA
cagtgccttcactgtacta

SEQ ID NO: 912 - RNA, 19 nt, synthetic construct
  source 1..19: mol_type = other RNA
nagtgccttcactgtacta

SEQ ID NO: 913 - RNA, 19 nt, synthetic construct
  source 1..19: mol_type = other RNA
cagtgccttcactgtactn

SEQ ID NO: 914 - RNA, 19 nt, synthetic construct
  source 1..19: mol_type = other RNA
nagtgccttcactgtactn

SEQ ID NO: 915 - RNA, 19 nt, synthetic construct
  source 1..19: mol_type = other RNA
catcaggaacagcttcgag

SEQ ID NO: 916 - RNA, 19 nt, synthetic construct
  source 1..19: mol_type = other RNA
catcaggaacagcttcgaa

SEQ ID NO: 917 - RNA, 19 nt, synthetic construct
  source 1..19: mol_type = other RNA
natcaggaacagcttcgaa

SEQ ID NO: 918 - RNA, 19 nt, synthetic construct
  source 1..19: mol_type = other RNA
catcaggaacagcttcgan

SEQ ID NO: 919 - RNA, 19 nt, synthetic construct
  source 1..19: mol_type = other RNA
natcaggaacagcttcgan

SEQ ID NO: 920 - RNA, 19 nt, synthetic construct
  modified_base 17: mod_base = i
  source 1..19: mol_type = other RNA
catcaggaacagcttcnag

SEQ ID NO: 921 - RNA, 19 nt, synthetic construct
  modified_base 17: mod_base = i
  source 1..19: mol_type = other RNA
catcaggaacagcttcnaa

SEQ ID NO: 922 - RNA, 19 nt, synthetic construct
  modified_base 17: mod_base = i
  source 1..19: mol_type = other RNA
natcaggaacagcttcnaa

SEQ ID NO: 923 - RNA, 19 nt, synthetic construct
  modified_base 17: mod_base = i
  source 1..19: mol_type = other RNA
catcaggaacagcttcnan

SEQ ID NO: 924 - RNA, 19 nt, synthetic construct
  modified_base 17: mod_base = i
  source 1..19: mol_type = other RNA
natcaggaacagcttcnan

SEQ ID NO: 925 - RNA, 19 nt, synthetic construct
  source 1..19: mol_type = other RNA
ctgatttgcctgaacaaga

SEQ ID NO: 926 - RNA, 19 nt, synthetic construct
  source 1..19: mol_type = other RNA
ntgatttgcctgaacaaga

SEQ ID NO: 927 - RNA, 19 nt, synthetic construct
  source 1..19: mol_type = other RNA
ctgatttgcctgaacaagn

SEQ ID NO: 928 - RNA, 19 nt, synthetic construct
  source 1..19: mol_type = other RNA
ntgatttgcctgaacaagn

SEQ ID NO: 929 - RNA, 19 nt, synthetic construct
  source 1..19: mol_type = other RNA
aggacaaccactttggtga

SEQ ID NO: 930 - RNA, 19 nt, synthetic construct
  source 1..19: mol_type = other RNA
nggacaaccactttggtga

SEQ ID NO: 931 - RNA, 19 nt, synthetic construct
  source 1..19: mol_type = other RNA
aggacaaccactttggtgn

SEQ ID NO: 932 - RNA, 19 nt, synthetic construct
  source 1..19: mol_type = other RNA
nggacaaccactttggtgn

SEQ ID NO: 933 - RNA, 19 nt, synthetic construct
  modified_base 15: mod_base = i
  source 1..19: mol_type = other RNA
aggacaaccactttngtga

SEQ ID NO: 934 - RNA, 19 nt, synthetic construct
  modified_base 15: mod_base = i
  source 1..19: mol_type = other RNA
nggacaaccactttngtga

SEQ ID NO: 935 - RNA, 19 nt, synthetic construct
  modified_base 15: mod_base = i
  source 1..19: mol_type = other RNA
aggacaaccactttngtgn

SEQ ID NO: 936 - RNA, 19 nt, synthetic construct
  modified_base 15: mod_base = i
  source 1..19: mol_type = other RNA
nggacaaccactttngtgn

SEQ ID NO: 937 - RNA, 19 nt, synthetic construct
  source 1..19: mol_type = other RNA
accagaacaacctctgctc

SEQ ID NO: 938 - RNA, 19 nt, synthetic construct
  source 1..19: mol_type = other RNA
accagaacaacctctgcta

SEQ ID NO: 939 - RNA, 19 nt, synthetic construct
  source 1..19: mol_type = other RNA
nccagaacaacctctgcta

SEQ ID NO: 940 - RNA, 19 nt, synthetic construct
  source 1..19: mol_type = other RNA
accagaacaacctctgctn

SEQ ID NO: 941 - RNA, 19 nt, synthetic construct
  source 1..19: mol_type = other RNA
nccagaacaacctctgctn

SEQ ID NO: 942 - RNA, 19 nt, synthetic construct
  modified_base 16: mod_base = i
  source 1..19: mol_type = other RNA
accagaacaacctctnctc

SEQ ID NO: 943 - RNA, 19 nt, synthetic construct
  modified_base 16: mod_base = i
  source 1..19: mol_type = other RNA
accagaacaacctctncta

SEQ ID NO: 944 - RNA, 19 nt, synthetic construct
  modified_base 16: mod_base = i
  source 1..19: mol_type = other RNA
nccagaacaacctctncta

SEQ ID NO: 945 - RNA, 19 nt, synthetic construct
  modified_base 16: mod_base = i
  source 1..19: mol_type = other RNA
accagaacaacctctnctn

SEQ ID NO: 946 - RNA, 19 nt, synthetic construct
  modified_base 16: mod_base = i
  source 1..19: mol_type = other RNA
nccagaacaacctctnctn

SEQ ID NO: 947 - RNA, 19 nt, synthetic construct
  source 1..19: mol_type = other RNA
ctacaaccagcacaatctc

SEQ ID NO: 948 - RNA, 19 nt, synthetic construct
  source 1..19: mol_type = other RNA
ctacaaccagcacaatcta

SEQ ID NO: 949 - RNA, 19 nt, synthetic construct
  source 1..19: mol_type = other RNA
ctacaaccagcacaatctn

SEQ ID NO: 950 - RNA, 19 nt, synthetic construct
  source 1..19: mol_type = other RNA
ntacaaccagcacaatcta

SEQ ID NO: 951 - RNA, 19 nt, synthetic construct
  source 1..19: mol_type = other RNA
ntacaaccagcacaatctn

SEQ ID NO: 952 - RNA, 19 nt, synthetic construct
  source 1..19: mol_type = other RNA
acaaccagcacaacttctg

SEQ ID NO: 953 - RNA, 19 nt, synthetic construct
  source 1..19: mol_type = other RNA
acaaccagcacaacttcta

SEQ ID NO: 954 - RNA, 19 nt, synthetic construct
  source 1..19: mol_type = other RNA
acaaccagcacaacttctn

SEQ ID NO: 955 - RNA, 19 nt, synthetic construct
  source 1..19: mol_type = other RNA
ncaaccagcacaacttcta

SEQ ID NO: 956 - RNA, 19 nt, synthetic construct
  source 1..19: mol_type = other RNA
ncaaccagcacaacttctn

SEQ ID NO: 957 - RNA, 19 nt, synthetic construct
  source 1..19: mol_type = other RNA
caaccactttggtgacaag

SEQ ID NO: 958 - RNA, 19 nt, synthetic construct
  source 1..19: mol_type = other RNA
caaccactttggtgacaaa

SEQ ID NO: 959 - RNA, 19 nt, synthetic construct
  source 1..19: mol_type = other RNA
caaccactttggtgacaan

SEQ ID NO: 960 - RNA, 19 nt, synthetic construct
  source 1..19: mol_type = other RNA
naaccactttggtgacaaa

SEQ ID NO: 961 - RNA, 19 nt, synthetic construct
  source 1..19: mol_type = other RNA
naaccactttggtgacaan

SEQ ID NO: 962 - RNA, 19 nt, synthetic construct
  source 1..19: mol_type = other RNA
acaaccaacacaacttctg

SEQ ID NO: 963 - RNA, 19 nt, synthetic construct
  source 1..19: mol_type = other RNA
acaaccaacacaacttcta

SEQ ID NO: 964 - RNA, 19 nt, synthetic construct
  source 1..19: mol_type = other RNA
acaaccaacacaacttctn

SEQ ID NO: 965 - RNA, 19 nt, synthetic construct
  source 1..19: mol_type = other RNA
ncaaccaacacaacttcta

SEQ ID NO: 966 - RNA, 19 nt, synthetic construct
  source 1..19: mol_type = other RNA
ncaaccaacacaacttctn

SEQ ID NO: 967 - RNA, 19 nt, synthetic construct
  source 1..19: mol_type = other RNA
ctctgctcctacaactaga

SEQ ID NO: 968 - RNA, 19 nt, synthetic construct
  source 1..19: mol_type = other RNA
ctctgctcctacaactagc

SEQ ID NO: 969 - RNA, 19 nt, synthetic construct
  source 1..19: mol_type = other RNA
ctctgctcctacaactagn

SEQ ID NO: 970 - RNA, 19 nt, synthetic construct
  source 1..19: mol_type = other RNA
ntctgctcctacaactaga

SEQ ID NO: 971 - RNA, 19 nt, synthetic construct
  source 1..19: mol_type = other RNA
ntctgctcctacaactagn

SEQ ID NO: 972 - RNA, 19 nt, synthetic construct
  source 1..19: mol_type = other RNA
gggaagtgttcctgaacca

SEQ ID NO: 973 - RNA, 19 nt, synthetic construct
  source 1..19: mol_type = other RNA
gggaagtgttcctgaaccn

SEQ ID NO: 974 - RNA, 19 nt, synthetic construct
  source 1..19: mol_type = other RNA
nggaagtgttcctgaacca

SEQ ID NO: 975 - RNA, 19 nt, synthetic construct
  source 1..19: mol_type = other RNA
nggaagtgttcctgaaccn

SEQ ID NO: 976 - RNA, 19 nt, synthetic construct
  modified_base 14: mod_base = i
  source 1..19: mol_type = other RNA
gggaagtgttcctnaacca

SEQ ID NO: 977 - RNA, 19 nt, synthetic construct
  modified_base 14: mod_base = i
  source 1..19: mol_type = other RNA
gggaagtgttcctnaaccn

SEQ ID NO: 978 - RNA, 19 nt, synthetic construct
  modified_base 14: mod_base = i
  source 1..19: mol_type = other RNA
nggaagtgttcctnaacca

SEQ ID NO: 979 - RNA, 19 nt, synthetic construct
  modified_base 14: mod_base = i
  source 1..19: mol_type = other RNA
nggaagtgttcctnaaccn

SEQ ID NO: 980 - RNA, 19 nt, synthetic construct
  source 1..19: mol_type = other RNA
tgggaacttcgacgacatc

SEQ ID NO: 981 - RNA, 19 nt, synthetic construct
  source 1..19: mol_type = other RNA
tgggaacttcgacgacata

SEQ ID NO: 982 - RNA, 19 nt, synthetic construct
  source 1..19: mol_type = other RNA
tgggaacttcgacgacatn

SEQ ID NO: 983 - RNA, 19 nt, synthetic construct
  source 1..19: mol_type = other RNA
ngggaacttcgacgacata

SEQ ID NO: 984 - RNA, 19 nt, synthetic construct
  source 1..19: mol_type = other RNA
ngggaacttcgacgacatn

SEQ ID NO: 985 - RNA, 19 nt, synthetic construct
  modified_base 14: mod_base = i
  source 1..19: mol_type = other RNA
tgggaacttcgacnacatc

SEQ ID NO: 986 - RNA, 19 nt, synthetic construct
  modified_base 14: mod_base = i
  source 1..19: mol_type = other RNA
tgggaacttcgacnacata

SEQ ID NO: 987 - RNA, 19 nt, synthetic construct
  modified_base 14: mod_base = i
  source 1..19: mol_type = other RNA
tgggaacttcgacnacatn

SEQ ID NO: 988 - RNA, 19 nt, synthetic construct
  modified_base 14: mod_base = i
  source 1..19: mol_type = other RNA
ngggaacttcgacnacata

SEQ ID NO: 989 - RNA, 19 nt, synthetic construct
  modified_base 14: mod_base = i
  source 1..19: mol_type = other RNA
ngggaacttcgacnacatn

SEQ ID NO: 990 - RNA, 19 nt, synthetic construct
  source 1..19: mol_type = other RNA
acctcctcttggcagaaat

SEQ ID NO: 991 - RNA, 19 nt, synthetic construct
  source 1..19: mol_type = other RNA
ncctcctcttggcagaaat

SEQ ID NO: 992 - RNA, 19 nt, synthetic construct
  source 1..19: mol_type = other RNA
acctcctcttggcagaaaa

SEQ ID NO: 993 - RNA, 19 nt, synthetic construct
  source 1..19: mol_type = other RNA
ncctcctcttggcagaaaa

SEQ ID NO: 994 - RNA, 19 nt, synthetic construct
  source 1..19: mol_type = other RNA
ncctcctcttggcagaaan

SEQ ID NO: 995 - RNA, 19 nt, synthetic construct
  modified_base 12: mod_base = i
  source 1..19: mol_type = other RNA
acctcctcttgncagaaat

SEQ ID NO: 996 - RNA, 19 nt, synthetic construct
  modified_base 12: mod_base = i
  source 1..19: mol_type = other RNA
ncctcctcttgncagaaat

SEQ ID NO: 997 - RNA, 19 nt, synthetic construct
  modified_base 12: mod_base = i
  source 1..19: mol_type = other RNA
acctcctcttgncagaaaa

SEQ ID NO: 998 - RNA, 19 nt, synthetic construct
  modified_base 12: mod_base = i
  source 1..19: mol_type = other RNA
ncctcctcttgncagaaaa

SEQ ID NO: 999 - RNA, 19 nt, synthetic construct
  modified_base 12: mod_base = i
  source 1..19: mol_type = other RNA
ncctcctcttgncagaaan

SEQ ID NO: 1000 - RNA, 19 nt, synthetic construct
  source 1..19: mol_type = other RNA
gagatcatcttcaacaaca

SEQ ID NO: 1001 - RNA, 19 nt, synthetic construct
  source 1..19: mol_type = other RNA
nagatcatcttcaacaaca

SEQ ID NO: 1002 - RNA, 19 nt, synthetic construct
  source 1..19: mol_type = other RNA
gagatcatcttcaacaacn

SEQ ID NO: 1003 - RNA, 19 nt, synthetic construct
  source 1..19: mol_type = other RNA
nagatcatcttcaacaacn

SEQ ID NO: 1004 - RNA, 19 nt, synthetic construct
  source 1..19: mol_type = other RNA
aaggaaacctacaacaaca

SEQ ID NO: 1005 - RNA, 19 nt, synthetic construct
  source 1..19: mol_type = other RNA
aaggaaacctacaacaacn

SEQ ID NO: 1006 - RNA, 19 nt, synthetic construct
  source 1..19: mol_type = other RNA
naggaaacctacaacaaca

SEQ ID NO: 1007 - RNA, 19 nt, synthetic construct
  source 1..19: mol_type = other RNA
naggaaacctacaacaacn

SEQ ID NO: 1008 - RNA, 19 nt, synthetic construct
  source 1..19: mol_type = other RNA
tctttgatgaggacaagat

SEQ ID NO: 1009 - RNA, 19 nt, synthetic construct
  source 1..19: mol_type = other RNA
nctttgatgaggacaagat

SEQ ID NO: 1010 - RNA, 19 nt, synthetic construct
  source 1..19: mol_type = other RNA
nctttgatgaggacaagan

SEQ ID NO: 1011 - RNA, 19 nt, synthetic construct
  source 1..19: mol_type = other RNA
tctttgatgaggacaagaa

SEQ ID NO: 1012 - RNA, 19 nt, synthetic construct
  source 1..19: mol_type = other RNA
nctttgatgaggacaagaa

SEQ ID NO: 1013 - RNA, 19 nt, synthetic construct
  source 1..19: mol_type = other RNA
tttgatgaggacaagatgc

SEQ ID NO: 1014 - RNA, 19 nt, synthetic construct
  source 1..19: mol_type = other RNA
tttgatgaggacaagatga

SEQ ID NO: 1015 - RNA, 19 nt, synthetic construct
  source 1..19: mol_type = other RNA
nttgatgaggacaagatga

SEQ ID NO: 1016 - RNA, 19 nt, synthetic construct
  source 1..19: mol_type = other RNA
tttgatgaggacaagatgn

SEQ ID NO: 1017 - RNA, 19 nt, synthetic construct
  source 1..19: mol_type = other RNA
nttgatgaggacaagatgn

SEQ ID NO: 1018 - RNA, 19 nt, synthetic construct
  source 1..19: mol_type = other RNA
ctctgctcctacaactagc

SEQ ID NO: 1019 - RNA, 19 nt, synthetic construct
  source 1..19: mol_type = other RNA
ctctgctcctacaactaga

SEQ ID NO: 1020 - RNA, 19 nt, synthetic construct
  source 1..19: mol_type = other RNA
ctctgctcctacaactagn

SEQ ID NO: 1021 - RNA, 19 nt, synthetic construct
  source 1..19: mol_type = other RNA
ntctgctcctacaactaga

SEQ ID NO: 1022 - RNA, 19 nt, synthetic construct
  source 1..19: mol_type = other RNA
ntctgctcctacaactagn

SEQ ID NO: 1023 - RNA, 19 nt, synthetic construct
  source 1..19: mol_type = other RNA
acctctgcttctacaacta

SEQ ID NO: 1024 - RNA, 19 nt, synthetic construct
  source 1..19: mol_type = other RNA
acctctgcttctacaactn

SEQ ID NO: 1025 - RNA, 19 nt, synthetic construct
  source 1..19: mol_type = other RNA
ncctctgcttctacaacta

SEQ ID NO: 1026 - RNA, 19 nt, synthetic construct
  source 1..19: mol_type = other RNA
ncctctgcttctacaactn

SEQ ID NO: 1027 - RNA, 19 nt, synthetic construct
  source 1..19: mol_type = other RNA
ataaccagcacaacttctg

SEQ ID NO: 1028 - RNA, 19 nt, synthetic construct
  source 1..19: mol_type = other RNA
ataaccagcacaacttcta

SEQ ID NO: 1029 - RNA, 19 nt, synthetic construct
  source 1..19: mol_type = other RNA
ataaccagcacaacttctn

SEQ ID NO: 1030 - RNA, 19 nt, synthetic construct
  source 1..19: mol_type = other RNA
ntaaccagcacaacttcta

SEQ ID NO: 1031 - RNA, 19 nt, synthetic construct
  source 1..19: mol_type = other RNA
ntaaccagcacaacttctn

SEQ ID NO: 1032 - RNA, 19 nt, synthetic construct
  source 1..19: mol_type = other RNA
acatcacctgcagtgttgg

SEQ ID NO: 1033 - RNA, 19 nt, synthetic construct
  source 1..19: mol_type = other RNA
acatcacctgcagtgttga

SEQ ID NO: 1034 - RNA, 19 nt, synthetic construct
  source 1..19: mol_type = other RNA
acatcacctgcagtgttgn

SEQ ID NO: 1035 - RNA, 19 nt, synthetic construct
  source 1..19: mol_type = other RNA
ncatcacctgcagtgttga

SEQ ID NO: 1036 - RNA, 19 nt, synthetic construct
  source 1..19: mol_type = other RNA
ncatcacctgcagtgttgn

SEQ ID NO: 1037 - RNA, 19 nt, synthetic construct
  modified_base 15: mod_base = i
  source 1..19: mol_type = other RNA
acatcacctgcagtnttgg

SEQ ID NO: 1038 - RNA, 19 nt, synthetic construct
  modified_base 15: mod_base = i
  source 1..19: mol_type = other RNA
acatcacctgcagtnttga

SEQ ID NO: 1039 - RNA, 19 nt, synthetic construct
  modified_base 15: mod_base = i
  source 1..19: mol_type = other RNA
acatcacctgcagtnttgn

SEQ ID NO: 1040 - RNA, 19 nt, synthetic construct
  modified_base 15: mod_base = i
  source 1..19: mol_type = other RNA
ncatcacctgcagtnttga

SEQ ID NO: 1041 - RNA, 19 nt, synthetic construct
  modified_base 15: mod_base = i
  source 1..19: mol_type = other RNA
ncatcacctgcagtnttgn

SEQ ID NO: 1042 - RNA, 19 nt, synthetic construct
  source 1..19: mol_type = other RNA
ctttgatgaggacaagatg

SEQ ID NO: 1043 - RNA, 19 nt, synthetic construct
  source 1..19: mol_type = other RNA
ctttgatgaggacaagata

SEQ ID NO: 1044 - RNA, 19 nt, synthetic construct
  source 1..19: mol_type = other RNA
ctttgatgaggacaagatn

SEQ ID NO: 1045 - RNA, 19 nt, synthetic construct
  source 1..19: mol_type = other RNA
ntttgatgaggacaagata

SEQ ID NO: 1046 - RNA, 19 nt, synthetic construct
  source 1..19: mol_type = other RNA
ntttgatgaggacaagatn

SEQ ID NO: 1047 - RNA, 19 nt, synthetic construct
  source 1..19: mol_type = other RNA
acgtcatctaccacacgac

SEQ ID NO: 1048 - RNA, 19 nt, synthetic construct
  source 1..19: mol_type = other RNA
acgtcatctaccacacgaa

SEQ ID NO: 1049 - RNA, 19 nt, synthetic construct
  source 1..19: mol_type = other RNA
acgtcatctaccacacgan

SEQ ID NO: 1050 - RNA, 19 nt, synthetic construct
  source 1..19: mol_type = other RNA
ncgtcatctaccacacgaa

SEQ ID NO: 1051 - RNA, 19 nt, synthetic construct
  source 1..19: mol_type = other RNA
ncgtcatctaccacacgan

SEQ ID NO: 1052 - RNA, 19 nt, synthetic construct
  modified_base 17: mod_base = i
  source 1..19: mol_type = other RNA
acgtcatctaccacacnac

SEQ ID NO: 1053 - RNA, 19 nt, synthetic construct
  modified_base 17: mod_base = i
  source 1..19: mol_type = other RNA
acgtcatctaccacacnaa

SEQ ID NO: 1054 - RNA, 19 nt, synthetic construct
  modified_base 17: mod_base = i
  source 1..19: mol_type = other RNA
acgtcatctaccacacnan

SEQ ID NO: 1055 - RNA, 19 nt, synthetic construct
  modified_base 17: mod_base = i
  source 1..19: mol_type = other RNA
ncgtcatctaccacacnaa

SEQ ID NO: 1056 - RNA, 19 nt, synthetic construct
  modified_base 17: mod_base = i
  source 1..19: mol_type = other RNA
ncgtcatctaccacacnan

SEQ ID NO: 1057 - RNA, 21 nt, synthetic construct
  modified_base 1: mod_base = um
  modified_base 1^2: mod_base = OTHER; note = phosphorothioate linkage
  modified_base 2: mod_base = OTHER; note = 2'-fluorouridine
  modified_base 2^3: mod_base = OTHER; note = phosphorothioate linkage
  modified_base 3: mod_base = um
  modified_base 3^4: mod_base = OTHER; note = phosphorothioate linkage
  modified_base 4: mod_base = OTHER; note = 2'-fluoroguanosine
  modified_base 5: mod_base = OTHER; note = 2'-O-methyladenosine
  modified_base 6: mod_base = OTHER; note = 2'-fluorouridine
  modified_base 7: mod_base = gm
  modified_base 8: mod_base = OTHER; note = 2'-fluoroguanosine
  modified_base 9: mod_base = cm
  modified_base 10: mod_base = OTHER; note = 2'-fluorocytidine
  modified_base 11: mod_base = um
  modified_base 12: mod_base = OTHER; note = 2'-fluorouridine
  modified_base 13: mod_base = gm
  modified_base 14: mod_base = OTHER; note = 2'-fluoroguanosine
  modified_base 15: mod_base = OTHER; note = 2'-O-methyladenosine
  modified_base 16: mod_base = OTHER; note = 2'-fluoroguanosine
  modified_base 17: mod_base = cm
  modified_base 18: mod_base = OTHER; note = 2'-fluoroadenosine
  modified_base 19: mod_base = gm
  modified_base 20: mod_base = OTHER; note = 2'-fluoroguanosine
  modified_base 20^21: mod_base = OTHER; note = phosphorothioate linkage
  modified_base 21: mod_base = um
  source 1..21: mol_type = other RNA
tttgatggccttggagcaggt

SEQ ID NO: 1058 - RNA, 21 nt, synthetic construct
  modified_base 1: mod_base = OTHER; note = 2'-O-methyladenosine
  modified_base 1^2: mod_base = OTHER; note = phosphorothioate linkage
  modified_base 2: mod_base = OTHER; note = 2'-fluoroadenosine
  modified_base 2^3: mod_base = OTHER; note = phosphorothioate linkage
  modified_base 3: mod_base = um
  modified_base 3^4: mod_base = OTHER; note = phosphorothioate linkage
  modified_base 4: mod_base = OTHER; note = 2'-fluorocytidine
  modified_base 5: mod_base = um
  modified_base 6: mod_base = OTHER; note = 2'-fluorouridine
  modified_base 7: mod_base = gm
  modified_base 8: mod_base = OTHER; note = 2'-fluoroadenosine
  modified_base 9: mod_base = um
  modified_base 10: mod_base = OTHER; note = 2'-fluoroguanosine
  modified_base 11: mod_base = gm
  modified_base 12: mod_base = OTHER; note = 2'-fluorocytidine
  modified_base 13: mod_base = cm
  modified_base 14: mod_base = OTHER; note = 2'-fluorouridine
  modified_base 15: mod_base = um
  modified_base 16: mod_base = OTHER; note = 2'-fluoroguanosine
  modified_base 17: mod_base = gm
  modified_base 18: mod_base = OTHER; note = 2'-fluoroadenosine
  modified_base 19: mod_base = gm
  modified_base 20: mod_base = OTHER; note = 2'-fluorocytidine
  modified_base 20^21: mod_base = OTHER; note = phosphorothioate linkage
  modified_base 21: mod_base = OTHER; note = 2'-O-methyladenosine
  source 1..21: mol_type = other RNA
aatcttgatggccttggagca

SEQ ID NO: 1059 - RNA, 21 nt, synthetic construct
  modified_base 1: mod_base = um
  modified_base 1^2: mod_base = OTHER; note = phosphorothioate linkage
  modified_base 2: mod_base = OTHER; note = 2'-fluorouridine
  modified_base 2^3: mod_base = OTHER; note = phosphorothioate linkage
  modified_base 3: mod_base = um
  modified_base 3^4: mod_base = OTHER; note = phosphorothioate linkage
  modified_base 4: mod_base = OTHER; note = 2'-fluoroguanosine
  modified_base 5: mod_base = OTHER; note = 2'-O-methyladenosine
  modified_base 6: mod_base = OTHER; note = 2'-fluoroadenosine
  modified_base 7: mod_base = cm
  modified_base 8: mod_base = OTHER; note = 2'-fluorouridine
  modified_base 9: mod_base = cm
  modified_base 10: mod_base = OTHER; note = 2'-fluoroguanosine
  modified_base 11: mod_base = gm
  modified_base 12: mod_base = OTHER; note = 2'-fluoroguanosine
  modified_base 13: mod_base = gm
  modified_base 14: mod_base = OTHER; note = 2'-fluorocytidine
  modified_base 15: mod_base = um
  modified_base 16: mod_base = OTHER; note = 2'-fluoroguanosine
  modified_base 17: mod_base = OTHER; note = 2'-O-methyladenosine
  modified_base 18: mod_base = OTHER; note = 2'-fluoroguanosine
  modified_base 19: mod_base = gm
  modified_base 20: mod_base = OTHER; note = 2'-fluorouridine
  modified_base 20^21: mod_base = OTHER; note = phosphorothioate linkage
  modified_base 21: mod_base = um
  source 1..21: mol_type = other RNA
tttgaactcggggctgaggtt

SEQ ID NO: 1060 - RNA, 21 nt, synthetic construct
  modified_base 1: mod_base = um
  modified_base 1^2: mod_base = OTHER; note = phosphorothioate linkage
  modified_base 2: mod_base = OTHER; note = 2'-fluoroguanosine
  modified_base 2^3: mod_base = OTHER; note = phosphorothioate linkage
  modified_base 3: mod_base = OTHER; note = 2'-O-methyladenosine
  modified_base 3^4: mod_base = OTHER; note = phosphorothioate linkage
  modified_base 4: mod_base = OTHER; note = 2'-fluorouridine
  modified_base 5: mod_base = gm
  modified_base 6: mod_base = OTHER; note = 2'-fluorocytidine
  modified_base 7: mod_base = um
  modified_base 8: mod_base = OTHER; note = 2'-fluoroguanosine
  modified_base 9: mod_base = cm
  modified_base 10: mod_base = OTHER; note = 2'-fluoroadenosine
  modified_base 11: mod_base = cm
  modified_base 12: mod_base = OTHER; note = 2'-fluorouridine
  modified_base 13: mod_base = gm
  modified_base 14: mod_base = OTHER; note = 2'-fluorocytidine
  modified_base 15: mod_base = um
  modified_base 16: mod_base = OTHER; note = 2'-fluorouridine
  modified_base 17: mod_base = cm
  modified_base 18: mod_base = OTHER; note = 2'-fluorouridine
  modified_base 19: mod_base = gm
  modified_base 20: mod_base = OTHER; note = 2'-fluoroguanosine
  modified_base 20^21: mod_base = OTHER; note = phosphorothioate linkage
  modified_base 21: mod_base = gm
  source 1..21: mol_type = other RNA
tgatgctgcactgcttctggg

SEQ ID NO: 1061 - RNA, 21 nt, synthetic construct
  modified_base 1: mod_base = um
  modified_base 1^2: mod_base = OTHER; note = phosphorothioate linkage
  modified_base 2: mod_base = OTHER; note = 2'-fluorouridine
  modified_base 2^3: mod_base = OTHER; note = phosphorothioate linkage
  modified_base 3: mod_base = OTHER; note = 2'-O-methyladenosine
  modified_base 3^4: mod_base = OTHER; note = phosphorothioate linkage
  modified_base 4: mod_base = OTHER; note = 2'-fluoroguanosine
  modified_base 5: mod_base = um
  modified_base 6: mod_base = OTHER; note = 2'-fluorocytidine
  modified_base 7: mod_base = gm
  modified_base 8: mod_base = OTHER; note = 2'-fluorocytidine
  modified_base 9: mod_base = OTHER; note = 2'-O-methyladenosine
  modified_base 10: mod_base = OTHER; note = 2'-fluoroguanosine
  modified_base 11: mod_base = OTHER; note = 2'-O-methyladenosine
  modified_base 12: mod_base = OTHER; note = 2'-fluoroadenosine
  modified_base 13: mod_base = cm
  modified_base 14: mod_base = OTHER; note = 2'-fluoroadenosine
  modified_base 15: mod_base = gm
  modified_base 16: mod_base = OTHER; note = 2'-fluoroadenosine
  modified_base 17: mod_base = gm
  modified_base 18: mod_base = OTHER; note = 2'-fluoroguanosine
  modified_base 19: mod_base = gm
  modified_base 20: mod_base = OTHER; note = 2'-fluorocytidine
  modified_base 20^21: mod_base = OTHER; note = phosphorothioate linkage
  modified_base 21: mod_base = OTHER; note = 2'-O-methyladenosine
  source 1..21: mol_type = other RNA
ttagtcgcagaacagagggca

SEQ ID NO: 1062 - RNA, 21 nt, synthetic construct
  modified_base 1: mod_base = OTHER; note = 2'-O-methyladenosine
  modified_base 1^2: mod_base = OTHER; note = phosphorothioate linkage
  modified_base 2: mod_base = OTHER; note = 2'-fluoroguanosine
  modified_base 2^3: mod_base = OTHER; note = phosphorothioate linkage
  modified_base 3: mod_base = um
  modified_base 3^4: mod_base = OTHER; note = phosphorothioate linkage
  modified_base 4: mod_base = OTHER; note = 2'-fluoroadenosine
  modified_base 5: mod_base = gm
  modified_base 6: mod_base = OTHER; note = 2'-fluorouridine
  modified_base 7: mod_base = cm
  modified_base 8: mod_base = OTHER; note = 2'-fluoroguanosine
  modified_base 9: mod_base = cm
  modified_base 10: mod_base = OTHER; note = 2'-fluoroadenosine
  modified_base 11: mod_base = gm
  modified_base 12: mod_base = OTHER; note = 2'-fluoroadenosine
  modified_base 13: mod_base = OTHER; note = 2'-O-methyladenosine
  modified_base 14: mod_base = OTHER; note = 2'-fluorocytidine
  modified_base 15: mod_base = OTHER; note = 2'-O-methyladenosine
  modified_base 16: mod_base = OTHER; note = 2'-fluoroguanosine
  modified_base 17: mod_base = OTHER; note = 2'-O-methyladenosine
  modified_base 18: mod_base = OTHER; note = 2'-fluoroguanosine
  modified_base 19: mod_base = gm
  modified_base 20: mod_base = OTHER; note = 2'-fluoroguanosine
  modified_base 20^21: mod_base = OTHER; note = phosphorothioate linkage
  modified_base 21: mod_base = cm
  source 1..21: mol_type = other RNA
agtagtcgcagaacagagggc

SEQ ID NO: 1063 - RNA, 21 nt, synthetic construct
  modified_base 1: mod_base = um
  modified_base 1^2: mod_base = OTHER; note = phosphorothioate linkage
  modified_base 2: mod_base = OTHER; note = 2'-fluorouridine
  modified_base 2^3: mod_base = OTHER; note = phosphorothioate linkage
  modified_base 3: mod_base = OTHER; note = 2'-O-methyladenosine
  modified_base 3^4: mod_base = OTHER; note = phosphorothioate linkage
  modified_base 4: mod_base = OTHER; note = 2'-fluoroguanosine
  modified_base 5: mod_base = um
  modified_base 6: mod_base = OTHER; note = 2'-fluoroadenosine
  modified_base 7: mod_base = gm
  modified_base 8: mod_base = OTHER; note = 2'-fluorouridine
  modified_base 9: mod_base = cm
  modified_base 10: mod_base = OTHER; note = 2'-fluoroguanosine
  modified_base 11: mod_base = cm
  modified_base 12: mod_base = OTHER; note = 2'-fluoroadenosine
  modified_base 13: mod_base = gm
  modified_base 14: mod_base = OTHER; note = 2'-fluoroadenosine
  modified_base 15: mod_base = OTHER; note = 2'-O-methyladenosine
  modified_base 16: mod_base = OTHER; note = 2'-fluorocytidine
  modified_base 17: mod_base = OTHER; note = 2'-O-methyladenosine
  modified_base 18: mod_base = OTHER; note = 2'-fluoroguanosine
  modified_base 19: mod_base = OTHER; note = 2'-O-methyladenosine
  modified_base 20: mod_base = OTHER; note = 2'-fluoroguanosine
  modified_base 20^21: mod_base = OTHER; note = phosphorothioate linkage
  modified_base 21: mod_base = gm
  source 1..21: mol_type = other RNA
ttagtagtcgcagaacagagg

SEQ ID NO: 1064 - RNA, 21 nt, synthetic construct
  modified_base 1: mod_base = um
  modified_base 1^2: mod_base = OTHER; note = phosphorothioate linkage
  modified_base 2: mod_base = OTHER; note = 2'-fluoroguanosine
  modified_base 2^3: mod_base = OTHER; note = phosphorothioate linkage
  modified_base 3: mod_base = um
  modified_base 3^4: mod_base = OTHER; note = phosphorothioate linkage
  modified_base 4: mod_base = OTHER; note = 2'-fluoroadenosine
  modified_base 5: mod_base = gm
  modified_base 6: mod_base = OTHER; note = 2'-fluorouridine
  modified_base 7: mod_base = OTHER; note = 2'-O-methyladenosine
  modified_base 8: mod_base = OTHER; note = 2'-fluoroguanosine
  modified_base 9: mod_base = um
  modified_base 10: mod_base = OTHER; note = 2'-fluorocytidine
  modified_base 11: mod_base = gm
  modified_base 12: mod_base = OTHER; note = 2'-fluorocytidine
  modified_base 13: mod_base = OTHER; note = 2'-O-methyladenosine
  modified_base 14: mod_base = OTHER; note = 2'-fluoroguanosine
  modified_base 15: mod_base = OTHER; note = 2'-O-methyladenosine
  modified_base 16: mod_base = OTHER; note = 2'-fluoroadenosine
  modified_base 17: mod_base = cm
  modified_base 18: mod_base = OTHER; note = 2'-fluoroadenosine
  modified_base 19: mod_base = gm
  modified_base 20: mod_base = OTHER; note = 2'-fluoroadenosine
  modified_base 20^21: mod_base = OTHER; note = phosphorothioate linkage
  modified_base 21: mod_base = gm
  source 1..21: mol_type = other RNA
tgtagtagtcgcagaacagag

SEQ ID NO: 1065 - RNA, 21 nt, synthetic construct
  modified_base 1: mod_base = um
  modified_base 1^2: mod_base = OTHER; note = phosphorothioate linkage
  modified_base 2: mod_base = OTHER; note = 2'-fluorouridine
  modified_base 2^3: mod_base = OTHER; note = phosphorothioate linkage
  modified_base 3: mod_base = gm
  modified_base 3^4: mod_base = OTHER; note = phosphorothioate linkage
  modified_base 4: mod_base = OTHER; note = 2'-fluorouridine
  modified_base 5: mod_base = OTHER; note = 2'-O-methyladenosine
  modified_base 6: mod_base = OTHER; note = 2'-fluoroguanosine
  modified_base 7: mod_base = um
  modified_base 8: mod_base = OTHER; note = 2'-fluoroadenosine
  modified_base 9: mod_base = gm
  modified_base 10: mod_base = OTHER; note = 2'-fluorouridine
  modified_base 11: mod_base = cm
  modified_base 12: mod_base = OTHER; note = 2'-fluoroguanosine
  modified_base 13: mod_base = cm
  modified_base 14: mod_base = OTHER; note = 2'-fluoroadenosine
  modified_base 15: mod_base = gm
  modified_base 16: mod_base = OTHER; note = 2'-fluoroadenosine
  modified_base 17: mod_base = OTHER; note = 2'-O-methyladenosine
  modified_base 18: mod_base = OTHER; note = 2'-fluorocytidine
  modified_base 19: mod_base = OTHER; note = 2'-O-methyladenosine
  modified_base 20: mod_base = OTHER; note = 2'-fluoroguanosine
  modified_base 20^21: mod_base = OTHER; note = phosphorothioate linkage
  modified_base 21: mod_base = cm
  source 1..21: mol_type = other RNA
ttgtagtagtcgcagaacagc

SEQ ID NO: 1066 - RNA, 21 nt, synthetic construct
  modified_base 1: mod_base = OTHER; note = 2'-O-methyladenosine
  modified_base 1^2: mod_base = OTHER; note = phosphorothioate linkage
  modified_base 2: mod_base = OTHER; note = 2'-fluorouridine
  modified_base 2^3: mod_base = OTHER; note = phosphorothioate linkage
  modified_base 3: mod_base = OTHER; note = 2'-O-methyladenosine
  modified_base 3^4: mod_base = OTHER; note = phosphorothioate linkage
  modified_base 4: mod_base = OTHER; note = 2'-fluoroguanosine
  modified_base 5: mod_base = um
  modified_base 6: mod_base = OTHER; note = 2'-fluorouridine
  modified_base 7: mod_base = gm
  modified_base 8: mod_base = OTHER; note = 2'-fluorouridine
  modified_base 9: mod_base = OTHER; note = 2'-O-methyladenosine
  modified_base 10: mod_base = OTHER; note = 2'-fluoroguanosine
  modified_base 11: mod_base = cm
  modified_base 12: mod_base = OTHER; note = 2'-fluoroadenosine
  modified_base 13: mod_base = gm
  modified_base 14: mod_base = OTHER; note = 2'-fluoroadenosine
  modified_base 15: mod_base = um
  modified_base 16: mod_base = OTHER; note = 2'-fluoroguanosine
  modified_base 17: mod_base = gm
  modified_base 18: mod_base = OTHER; note = 2'-fluoroguanosine
  modified_base 19: mod_base = um
  modified_base 20: mod_base = OTHER; note = 2'-fluoroguanosine
  modified_base 20^21: mod_base = OTHER; note = phosphorothioate linkage
  modified_base 21: mod_base = gm
  source 1..21: mol_type = other RNA
atagttgtagcagatgggtgg

SEQ ID NO: 1067 - RNA, 21 nt, synthetic construct
  modified_base 1: mod_base = um
  modified_base 1^2: mod_base = OTHER; note = phosphorothioate linkage
  modified_base 2: mod_base = OTHER; note = 2'-fluorouridine
  modified_base 2^3: mod_base = OTHER; note = phosphorothioate linkage
  modified_base 3: mod_base = cm
  modified_base 3^4: mod_base = OTHER; note = phosphorothioate linkage
  modified_base 4: mod_base = OTHER; note = 2'-fluorocytidine
  modified_base 5: mod_base = OTHER; note = 2'-O-methyladenosine
  modified_base 6: mod_base = OTHER; note = 2'-fluorocytidine
  modified_base 7: mod_base = gm
  modified_base 8: mod_base = OTHER; note = 2'-fluorouridine
  modified_base 9: mod_base = cm
  modified_base 10: mod_base = OTHER; note = 2'-fluoroguanosine
  modified_base 11: mod_base = OTHER; note = 2'-O-methyladenosine
  modified_base 12: mod_base = OTHER; note = 2'-fluoroadenosine
  modified_base 13: mod_base = cm
  modified_base 14: mod_base = OTHER; note = 2'-fluorocytidine
  modified_base 15: mod_base = OTHER; note = 2'-O-methyladenosine
  modified_base 16: mod_base = OTHER; note = 2'-fluorocytidine
  modified_base 17: mod_base = um
  modified_base 18: mod_base = OTHER; note = 2'-fluorouridine
  modified_base 19: mod_base = um
  modified_base 20: mod_base = OTHER; note = 2'-fluoroguanosine
  modified_base 20^21: mod_base = OTHER; note = phosphorothioate linkage
  modified_base 21: mod_base = cm
  source 1..21: mol_type = other RNA
ttccacgtcgaaccactttgc

SEQ ID NO: 1068 - RNA, 21 nt, synthetic construct
  modified_base 1: mod_base = um
  modified_base 1^2: mod_base = OTHER; note = phosphorothioate linkage
  modified_base 2: mod_base = OTHER; note = 2'-fluoroadenosine
  modified_base 2^3: mod_base = OTHER; note = phosphorothioate linkage
  modified_base 3: mod_base = OTHER; note = 2'-O-methyladenosine
  modified_base 3^4: mod_base = OTHER; note = phosphorothioate linkage
  modified_base 4: mod_base = OTHER; note = 2'-fluoroguanosine
  modified_base 5: mod_base = um
  modified_base 6: mod_base = OTHER; note = 2'-fluorocytidine
  modified_base 7: mod_base = cm
  modified_base 8: mod_base = OTHER; note = 2'-fluoroadenosine
  modified_base 9: mod_base = cm
  modified_base 10: mod_base = OTHER; note = 2'-fluoroguanosine
  modified_base 11: mod_base = um
  modified_base 12: mod_base = OTHER; note = 2'-fluorocytidine
  modified_base 13: mod_base = gm
  modified_base 14: mod_base = OTHER; note = 2'-fluoroadenosine
  modified_base 15: mod_base = OTHER; note = 2'-O-methyladenosine
  modified_base 16: mod_base = OTHER; note = 2'-fluorocytidine
  modified_base 17: mod_base = cm
  modified_base 18: mod_base = OTHER; note = 2'-fluoroadenosine
  modified_base 19: mod_base = cm
  modified_base 20: mod_base = OTHER; note = 2'-fluorouridine
  modified_base 20^21: mod_base = OTHER; note = phosphorothioate linkage
  modified_base 21: mod_base = cm
  source 1..21: mol_type = other RNA
taagtccacgtcgaaccactc

SEQ ID NO: 1069 - RNA, 21 nt, synthetic construct
  modified_base 1: mod_base = um
  modified_base 1^2: mod_base = OTHER; note = phosphorothioate linkage
  modified_base 2: mod_base = OTHER; note = 2'-fluoroguanosine
  modified_base 2^3: mod_base = OTHER; note = phosphorothioate linkage
  modified_base 3: mod_base = gm
  modified_base 3^4: mod_base = OTHER; note = phosphorothioate linkage
  modified_base 4: mod_base = OTHER; note = 2'-fluoroadenosine
  modified_base 5: mod_base = OTHER; note = 2'-O-methyladenosine
  modified_base 6: mod_base = OTHER; note = 2'-fluoroguanosine
  modified_base 7: mod_base = um
  modified_base 8: mod_base = OTHER; note = 2'-fluorocytidine
  modified_base 9: mod_base = cm
  modified_base 10: mod_base = OTHER; note = 2'-fluoroadenosine
  modified_base 11: mod_base = cm
  modified_base 12: mod_base = OTHER; note = 2'-fluoroguanosine
  modified_base 13: mod_base = um
  modified_base 14: mod_base = OTHER; note = 2'-fluorocytidine
  modified_base 15: mod_base = gm
  modified_base 16: mod_base = OTHER; note = 2'-fluoroadenosine
  modified_base 17: mod_base = OTHER; note = 2'-O-methyladenosine
  modified_base 18: mod_base = OTHER; note = 2'-fluorocytidine
  modified_base 19: mod_base = cm
  modified_base 20: mod_base = OTHER; note = 2'-fluoroadenosine
  modified_base 20^21: mod_base = OTHER; note = phosphorothioate linkage
  modified_base 21: mod_base = cm
  source 1..21: mol_type = other RNA
tggaagtccacgtcgaaccac

SEQ ID NO: 1070 - RNA, 21 nt, synthetic construct
  modified_base 1: mod_base = um
  modified_base 1^2: mod_base = OTHER; note = phosphorothioate linkage
  modified_base 2: mod_base = OTHER; note = 2'-fluoroguanosine
  modified_base 2^3: mod_base = OTHER; note = phosphorothioate linkage
  modified_base 3: mod_base = gm
  modified_base 3^4: mod_base = OTHER; note = phosphorothioate linkage
  modified_base 4: mod_base = OTHER; note = 2'-fluoroadenosine
  modified_base 5: mod_base = OTHER; note = 2'-O-methyladenosine
  modified_base 6: mod_base = OTHER; note = 2'-fluoroguanosine
  modified_base 7: mod_base = OTHER; note = 2',3'-seco-uridine
  modified_base 8: mod_base = OTHER; note = 2'-fluorocytidine
  modified_base 9: mod_base = cm
  modified_base 10: mod_base = OTHER; note = 2'-fluoroadenosine
  modified_base 11: mod_base = cm
  modified_base 12: mod_base = OTHER; note = 2'-fluoroguanosine
  modified_base 13: mod_base = um
  modified_base 14: mod_base = OTHER; note = 2'-fluorocytidine
  modified_base 15: mod_base = gm
  modified_base 16: mod_base = OTHER; note = 2'-fluoroadenosine
  modified_base 17: mod_base = OTHER; note = 2'-O-methyladenosine
  modified_base 18: mod_base = OTHER; note = 2'-fluorocytidine
  modified_base 19: mod_base = cm
  modified_base 20: mod_base = OTHER; note = 2'-fluoroadenosine
  modified_base 20^21: mod_base = OTHER; note = phosphorothioate linkage
  modified_base 21: mod_base = cm
  source 1..21: mol_type = other RNA
tggaagtccacgtcgaaccac

SEQ ID NO: 1071 - RNA, 21 nt, synthetic construct
  modified_base 1: mod_base = OTHER; note = 5'-cyclopropyl phosphonate-2'-O-methyladenosine
  modified_base 1^2: mod_base = OTHER; note = phosphorothioate linkage
  modified_base 2: mod_base = OTHER; note = 2'-fluoroadenosine
  modified_base 2^3: mod_base = OTHER; note = phosphorothioate linkage
  modified_base 3: mod_base = gm
  modified_base 3^4: mod_base = OTHER; note = phosphorothioate linkage
  modified_base 4: mod_base = OTHER; note = 2'-fluoroguanosine
  modified_base 5: mod_base = um
  modified_base 6: mod_base = OTHER; note = 2'-fluorocytidine
  modified_base 7: mod_base = um
  modified_base 8: mod_base = OTHER; note = 2'-fluorouridine
  modified_base 9: mod_base = gm
  modified_base 10: mod_base = OTHER; note = 2'-fluorouridine
  modified_base 11: mod_base = OTHER; note = 2'-O-methyladenosine
  modified_base 12: mod_base = OTHER; note = 2'-fluoroguanosine
  modified_base 13: mod_base = um
  modified_base 14: mod_base = OTHER; note = 2'-fluoroguanosine
  modified_base 15: mod_base = gm
  modified_base 16: mod_base = OTHER; note = 2'-fluoroadenosine
  modified_base 17: mod_base = OTHER; note = 2'-O-methyladenosine
  modified_base 18: mod_base = OTHER; note = 2'-fluoroguanosine
  modified_base 19: mod_base = cm
  modified_base 20: mod_base = OTHER; note = 2'-fluorouridine
  modified_base 20^21: mod_base = OTHER; note = phosphorothioate linkage
  modified_base 21: mod_base = gm
  source 1..21: mol_type = other RNA
aaggtcttgtagtggaagctg

SEQ ID NO: 1072 - RNA, 21 nt, synthetic construct
  modified_base 1: mod_base = OTHER; note = 5'-cyclopropyl phosphonate-2'-O-methyladenosine
  modified_base 1^2: mod_base = OTHER; note = phosphorothioate linkage
  modified_base 2: mod_base = OTHER; note = 2'-fluoroadenosine
  modified_base 2^3: mod_base = OTHER; note = phosphorothioate linkage
  modified_base 3: mod_base = gm
  modified_base 3^4: mod_base = OTHER; note = phosphorothioate linkage
  modified_base 4: mod_base = OTHER; note = 2'-fluoroguanosine
  modified_base 5: mod_base = um
  modified_base 6: mod_base = OTHER; note = 2'-fluorocytidine
  modified_base 7: mod_base = OTHER; note = 2',3'-seco-uridine
  modified_base 8: mod_base = OTHER; note = 2'-fluorouridine
  modified_base 9: mod_base = gm
  modified_base 10: mod_base = OTHER; note = 2'-fluorouridine
  modified_base 11: mod_base = OTHER; note = 2'-O-methyladenosine
  modified_base 12: mod_base = OTHER; note = 2'-fluoroguanosine
  modified_base 13: mod_base = um
  modified_base 14: mod_base = OTHER; note = 2'-fluoroguanosine
  modified_base 15: mod_base = gm
  modified_base 16: mod_base = OTHER; note = 2'-fluoroadenosine
  modified_base 17: mod_base = OTHER; note = 2'-O-methyladenosine
  modified_base 18: mod_base = OTHER; note = 2'-fluoroguanosine
  modified_base 19: mod_base = cm
  modified_base 20: mod_base = OTHER; note = 2'-fluorouridine
  modified_base 20^21: mod_base = OTHER; note = phosphorothioate linkage
  modified_base 21: mod_base = gm
  source 1..21: mol_type = other RNA
aaggtcttgtagtggaagctg

SEQ ID NO: 1073 - RNA, 21 nt, synthetic construct
  modified_base 1: mod_base = OTHER; note = 5'-cyclopropyl phosphonate-2'-O-methyluridine
  modified_base 1^2: mod_base = OTHER; note = phosphorothioate linkage
  modified_base 2: mod_base = OTHER; note = 2'-fluoroadenosine
  modified_base 2^3: mod_base = OTHER; note = phosphorothioate linkage
  modified_base 3: mod_base = cm
  modified_base 3^4: mod_base = OTHER; note = phosphorothioate linkage
  modified_base 4: mod_base = OTHER; note = 2'-fluorocytidine
  modified_base 5: mod_base = OTHER; note = 2'-O-methyladenosine
  modified_base 6: mod_base = OTHER; note = 2'-fluoroguanosine
  modified_base 7: mod_base = um
  modified_base 8: mod_base = OTHER; note = 2'-fluoroguanosine
  modified_base 9: mod_base = cm
  modified_base 10: mod_base = OTHER; note = 2'-fluorouridine
  modified_base 11: mod_base = gm
  modified_base 12: mod_base = OTHER; note = 2'-fluoroadenosine
  modified_base 13: mod_base = gm
  modified_base 14: mod_base = OTHER; note = 2'-fluorocytidine
  modified_base 15: mod_base = OTHER; note = 2'-O-methyladenosine
  modified_base 16: mod_base = OTHER; note = 2'-fluorouridine
  modified_base 17: mod_base = OTHER; note = 2'-O-methyladenosine
  modified_base 18: mod_base = OTHER; note = 2'-fluorocytidine
  modified_base 19: mod_base = um
  modified_base 20: mod_base = OTHER; note = 2'-fluorouridine
  modified_base 20^21: mod_base = OTHER; note = phosphorothioate linkage
  modified_base 21: mod_base = cm
  source 1..21: mol_type = other RNA
taccagtgctgagcatacttc

SEQ ID NO: 1074 - RNA, 21 nt, synthetic construct
  modified_base 1: mod_base = OTHER; note = 5'-cyclopropyl phosphonate-2'-O-methyluridine
  modified_base 1^2: mod_base = OTHER; note = phosphorothioate linkage
  modified_base 2: mod_base = OTHER; note = 2'-fluoroadenosine
  modified_base 2^3: mod_base = OTHER; note = phosphorothioate linkage
  modified_base 3: mod_base = cm
  modified_base 3^4: mod_base = OTHER; note = phosphorothioate linkage
  modified_base 4: mod_base = OTHER; note = 2'-fluorocytidine
  modified_base 5: mod_base = OTHER; note = 2'-O-methyladenosine
  modified_base 6: mod_base = OTHER; note = 2'-fluoroguanosine
  modified_base 7: mod_base = OTHER; note = 2',3'-seco-uridine
  modified_base 8: mod_base = OTHER; note = 2'-fluoroguanosine
  modified_base 9: mod_base = cm
  modified_base 10: mod_base = OTHER; note = 2'-fluorouridine
  modified_base 11: mod_base = gm
  modified_base 12: mod_base = OTHER; note = 2'-fluoroadenosine
  modified_base 13: mod_base = gm
  modified_base 14: mod_base = OTHER; note = 2'-fluorocytidine
  modified_base 15: mod_base = OTHER; note = 2'-O-methyladenosine
  modified_base 16: mod_base = OTHER; note = 2'-fluorouridine
  modified_base 17: mod_base = OTHER; note = 2'-O-methyladenosine
  modified_base 18: mod_base = OTHER; note = 2'-fluorocytidine
  modified_base 19: mod_base = um
  modified_base 20: mod_base = OTHER; note = 2'-fluorouridine
  modified_base 20^21: mod_base = OTHER; note = phosphorothioate linkage
  modified_base 21: mod_base = cm
  source 1..21: mol_type = other RNA
taccagtgctgagcatacttc

SEQ ID NO: 1075 - RNA, 21 nt, synthetic construct
  modified_base 1: mod_base = OTHER; note = 5'-cyclopropyl phosphonate-2'-O-methyluridine
  modified_base 1^2: mod_base = OTHER; note = phosphorothioate linkage
  modified_base 2: mod_base = OTHER; note = 2'-fluorouridine
  modified_base 2^3: mod_base = OTHER; note = phosphorothioate linkage
  modified_base 3: mod_base = um
  modified_base 3^4: mod_base = OTHER; note = phosphorothioate linkage
  modified_base 4: mod_base = OTHER; note = 2'-fluoroguanosine
  modified_base 5: mod_base = OTHER; note = 2'-O-methyladenosine
  modified_base 6: mod_base = OTHER; note = 2'-fluoroadenosine
  modified_base 7: mod_base = gm
  modified_base 8: mod_base = gm
  modified_base 9: mod_base = um
  modified_base 10: mod_base = gm
  modified_base 11: mod_base = um
  modified_base 12: mod_base = OTHER; note = 2'-fluorouridine
  modified_base 13: mod_base = gm
  modified_base 14: mod_base = OTHER; note = 2'-fluoroadenosine
  modified_base 15: mod_base = OTHER; note = 2'-O-methyladenosine
  modified_base 16: mod_base = OTHER; note = 2'-fluoroguanosine
  modified_base 17: mod_base = OTHER; note = 2'-O-methyladenosine
  modified_base 18: mod_base = OTHER; note = 2'-fluoroadenosine
  modified_base 19: mod_base = gm
  modified_base 20: mod_base = OTHER; note = 2'-fluoroguanosine
  modified_base 20^21: mod_base = OTHER; note = phosphorothioate linkage
  modified_base 21: mod_base = cm
  source 1..21: mol_type = other RNA
tttgaaggtgttgaagaaggc

SEQ ID NO: 1076 - RNA, 21 nt, synthetic construct
  modified_base 1: mod_base = OTHER; note = 2'-O-methyladenosine
  modified_base 1^2: mod_base = OTHER; note = phosphorothioate linkage
  modified_base 2: mod_base = OTHER; note = 2'-fluoroguanosine
  modified_base 2^3: mod_base = OTHER; note = phosphorothioate linkage
  modified_base 3: mod_base = OTHER; note = 2'-O-methyladenosine
  modified_base 3^4: mod_base = OTHER; note = phosphorothioate linkage
  modified_base 4: mod_base = OTHER; note = 2'-fluorouridine
  modified_base 5: mod_base = gm
  modified_base 6: mod_base = OTHER; note = 2'-fluorocytidine
  modified_base 7: mod_base = um
  modified_base 8: mod_base = OTHER; note = 2'-fluoroguanosine
  modified_base 9: mod_base = gm
  modified_base 10: mod_base = OTHER; note = 2'-fluorouridine
  modified_base 11: mod_base = cm
  modified_base 12: mod_base = OTHER; note = 2'-fluorouridine
  modified_base 13: mod_base = um
  modified_base 14: mod_base = OTHER; note = 2'-fluorocytidine
  modified_base 15: mod_base = um
  modified_base 16: mod_base = OTHER; note = 2'-fluorouridine
  modified_base 17: mod_base = gm
  modified_base 18: mod_base = OTHER; note = 2'-fluorouridine
  modified_base 19: mod_base = cm
  modified_base 20: mod_base = OTHER; note = 2'-fluorocytidine
  modified_base 20^21: mod_base = OTHER; note = phosphorothioate linkage
  modified_base 21: mod_base = cm
  source 1..21: mol_type = other RNA
agatgctggtcttcttgtccc

SEQ ID NO: 1077 - RNA, 21 nt, synthetic construct
  modified_base 1: mod_base = um
  modified_base 1^2: mod_base = OTHER; note = phosphorothioate linkage
  modified_base 2: mod_base = OTHER; note = 2'-fluoroguanosine
  modified_base 2^3: mod_base = OTHER; note = phosphorothioate linkage
  modified_base 3: mod_base = um
  modified_base 3^4: mod_base = OTHER; note = phosphorothioate linkage
  modified_base 4: mod_base = OTHER; note = 2'-fluorouridine
  modified_base 5: mod_base = gm
  modified_base 6: mod_base = OTHER; note = 2'-fluoroadenosine
  modified_base 7: mod_base = um
  modified_base 8: mod_base = OTHER; note = 2'-fluoroguanosine
  modified_base 9: mod_base = OTHER; note = 2'-O-methyladenosine
  modified_base 10: mod_base = OTHER; note = 2'-fluoroadenosine
  modified_base 11: mod_base = gm
  modified_base 12: mod_base = OTHER; note = 2'-fluoroadenosine
  modified_base 13: mod_base = um
  modified_base 14: mod_base = OTHER; note = 2'-fluoroguanosine
  modified_base 15: mod_base = cm
  modified_base 16: mod_base = OTHER; note = 2'-fluorouridine
  modified_base 17: mod_base = gm
  modified_base 18: mod_base = OTHER; note = 2'-fluoroguanosine
  modified_base 19: mod_base = um
  modified_base 20: mod_base = OTHER; note = 2'-fluorocytidine
  modified_base 20^21: mod_base = OTHER; note = phosphorothioate linkage
  modified_base 21: mod_base = cm
  source 1..21: mol_type = other RNA
tgttgatgaagatgctggtcc

SEQ ID NO: 1078 - RNA, 21 nt, synthetic construct
  modified_base 1: mod_base = um
  modified_base 1^2: mod_base = OTHER; note = phosphorothioate linkage
  modified_base 2: mod_base = OTHER; note = 2'-fluorouridine
  modified_base 2^3: mod_base = OTHER; note = phosphorothioate linkage
  modified_base 3: mod_base = cm
  modified_base 3^4: mod_base = OTHER; note = phosphorothioate linkage
  modified_base 4: mod_base = OTHER; note = 2'-fluorouridine
  modified_base 5: mod_base = um
  modified_base 6: mod_base = OTHER; note = 2'-fluoroguanosine
  modified_base 7: mod_base = um
  modified_base 8: mod_base = OTHER; note = 2'-fluorouridine
  modified_base 9: mod_base = cm
  modified_base 10: mod_base = OTHER; note = 2'-fluoroadenosine
  modified_base 11: mod_base = gm
  modified_base 12: mod_base = OTHER; note = 2'-fluoroguanosine
  modified_base 13: mod_base = cm
  modified_base 14: mod_base = OTHER; note = 2'-fluoroadenosine
  modified_base 15: mod_base = OTHER; note = 2'-O-methyladenosine
  modified_base 16: mod_base = OTHER; note = 2'-fluoroadenosine
  modified_base 17: mod_base = um
  modified_base 18: mod_base = OTHER; note = 2'-fluorocytidine
  modified_base 19: mod_base = OTHER; note = 2'-O-methyladenosine
  modified_base 20: mod_base = OTHER; note = 2'-fluoroguanosine
  modified_base 20^21: mod_base = OTHER; note = phosphorothioate linkage
  modified_base 21: mod_base = cm
  source 1..21: mol_type = other RNA
ttcttgttcaggcaaatcagc

SEQ ID NO: 1079 - RNA, 21 nt, synthetic construct
  modified_base 1: mod_base = OTHER; note = 2'-O-methyladenosine
  modified_base 1^2: mod_base = OTHER; note = phosphorothioate linkage
  modified_base 2: mod_base = OTHER; note = 2'-fluorouridine
  modified_base 2^3: mod_base = OTHER; note = phosphorothioate linkage
  modified_base 3: mod_base = gm
  modified_base 3^4: mod_base = OTHER; note = phosphorothioate linkage
  modified_base 4: mod_base = OTHER; note = 2'-fluorouridine
  modified_base 5: mod_base = um
  modified_base 6: mod_base = OTHER; note = 2'-fluoroguanosine
  modified_base 7: mod_base = um
  modified_base 8: mod_base = OTHER; note = 2'-fluorouridine
  modified_base 9: mod_base = gm
  modified_base 10: mod_base = OTHER; note = 2'-fluorouridine
  modified_base 11: mod_base = OTHER; note = 2'-O-methyladenosine
  modified_base 12: mod_base = OTHER; note = 2'-fluoroguanosine
  modified_base 13: mod_base = gm
  modified_base 14: mod_base = OTHER; note = 2'-fluorouridine
  modified_base 15: mod_base = um
  modified_base 16: mod_base = OTHER; note = 2'-fluorouridine
  modified_base 17: mod_base = cm
  modified_base 18: mod_base = OTHER; note = 2'-fluorocytidine
  modified_base 19: mod_base = um
  modified_base 20: mod_base = OTHER; note = 2'-fluorouridine
  modified_base 20^21: mod_base = OTHER; note = phosphorothioate linkage
  modified_base 21: mod_base = gm
  source 1..21: mol_type = other RNA
atgttgttgtaggtttccttg

SEQ ID NO: 1080 - RNA, 21 nt, synthetic construct
  modified_base 1: mod_base = OTHER; note = 2'-O-methyladenosine
  modified_base 1^2: mod_base = OTHER; note = phosphorothioate linkage
  modified_base 2: mod_base = OTHER; note = 2'-fluorouridine
  modified_base 2^3: mod_base = OTHER; note = phosphorothioate linkage
  modified_base 3: mod_base = gm
  modified_base 3^4: mod_base = OTHER; note = phosphorothioate linkage
  modified_base 4: mod_base = OTHER; note = 2'-fluoroadenosine
  modified_base 5: mod_base = um
  modified_base 6: mod_base = OTHER; note = 2'-fluoroguanosine
  modified_base 7: mod_base = um
  modified_base 8: mod_base = OTHER; note = 2'-fluorouridine
  modified_base 9: mod_base = gm
  modified_base 10: mod_base = OTHER; note = 2'-fluorouridine
  modified_base 11: mod_base = um
  modified_base 12: mod_base = OTHER; note = 2'-fluoroguanosine
  modified_base 13: mod_base = um
  modified_base 14: mod_base = OTHER; note = 2'-fluoroadenosine
  modified_base 15: mod_base = gm
  modified_base 16: mod_base = OTHER; note = 2'-fluoroguanosine
  modified_base 17: mod_base = um
  modified_base 18: mod_base = OTHER; note = 2'-fluorouridine
  modified_base 19: mod_base = um
  modified_base 20: mod_base = OTHER; note = 2'-fluorocytidine
  modified_base 20^21: mod_base = OTHER; note = phosphorothioate linkage
  modified_base 21: mod_base = cm
  source 1..21: mol_type = other RNA
atgatgttgttgtaggtttcc

SEQ ID NO: 1081 - RNA, 21 nt, synthetic construct
  modified_base 1: mod_base = um
  modified_base 1^2: mod_base = OTHER; note = phosphorothioate linkage
  modified_base 2: mod_base = OTHER; note = 2'-fluorouridine
  modified_base 2^3: mod_base = OTHER; note = phosphorothioate linkage
  modified_base 3: mod_base = gm
  modified_base 3^4: mod_base = OTHER; note = phosphorothioate linkage
  modified_base 4: mod_base = OTHER; note = 2'-fluoroadenosine
  modified_base 5: mod_base = um
  modified_base 6: mod_base = OTHER; note = 2'-fluoroguanosine
  modified_base 7: mod_base = OTHER; note = 2'-O-methyladenosine
  modified_base 8: mod_base = OTHER; note = 2'-fluoroadenosine
  modified_base 9: mod_base = gm
  modified_base 10: mod_base = OTHER; note = 2'-fluoroadenosine
  modified_base 11: mod_base = um
  modified_base 12: mod_base = OTHER; note = 2'-fluoroguanosine
  modified_base 13: mod_base = cm
  modified_base 14: mod_base = OTHER; note = 2'-fluorouridine
  modified_base 15: mod_base = gm
  modified_base 16: mod_base = OTHER; note = 2'-fluoroguanosine
  modified_base 17: mod_base = um
  modified_base 18: mod_base = OTHER; note = 2'-fluorocytidine
  modified_base 19: mod_base = um
  modified_base 20: mod_base = OTHER; note = 2'-fluorouridine
  modified_base 20^21: mod_base = OTHER; note = phosphorothioate linkage
  modified_base 21: mod_base = cm
  source 1..21: mol_type = other RNA
ttgatgaagatgctggtcttc

SEQ ID NO: 1082 - RNA, 21 nt, synthetic construct
  modified_base 1: mod_base = um
  modified_base 1^2: mod_base = OTHER; note = phosphorothioate linkage
  modified_base 2: mod_base = OTHER; note = 2'-fluoroguanosine
  modified_base 2^3: mod_base = OTHER; note = phosphorothioate linkage
  modified_base 3: mod_base = OTHER; note = 2'-O-methyladenosine
  modified_base 3^4: mod_base = OTHER; note = phosphorothioate linkage
  modified_base 4: mod_base = OTHER; note = 2'-fluorouridine
  modified_base 5: mod_base = cm
  modified_base 6: mod_base = OTHER; note = 2'-fluorouridine
  modified_base 7: mod_base = gm
  modified_base 8: mod_base = OTHER; note = 2'-fluoroguanosine
  modified_base 9: mod_base = um
  modified_base 10: mod_base = OTHER; note = 2'-fluoroadenosine
  modified_base 11: mod_base = gm
  modified_base 12: mod_base = OTHER; note = 2'-fluorouridine
  modified_base 13: mod_base = um
  modified_base 14: mod_base = OTHER; note = 2'-fluoroguanosine
  modified_base 15: mod_base = um
  modified_base 16: mod_base = OTHER; note = 2'-fluoroadenosine
  modified_base 17: mod_base = gm
  modified_base 18: mod_base = OTHER; note = 2'-fluorocytidine
  modified_base 19: mod_base = OTHER; note = 2'-O-methyladenosine
  modified_base 20: mod_base = OTHER; note = 2'-fluoroguanosine
  modified_base 20^21: mod_base = OTHER; note = phosphorothioate linkage
  modified_base 21: mod_base = cm
  source 1..21: mol_type = other RNA
tgatctggtagttgtagcagc

SEQ ID NO: 1083 - RNA, 21 nt, synthetic construct
  modified_base 1: mod_base = um
  modified_base 1^2: mod_base = OTHER; note = phosphorothioate linkage
  modified_base 2: mod_base = OTHER; note = 2'-fluorocytidine
  modified_base 2^3: mod_base = OTHER; note = phosphorothioate linkage
  modified_base 3: mod_base = cm
  modified_base 3^4: mod_base = OTHER; note = phosphorothioate linkage
  modified_base 4: mod_base = OTHER; note = 2'-fluorouridine
  modified_base 5: mod_base = gm
  modified_base 6: mod_base = OTHER; note = 2'-fluoroadenosine
  modified_base 7: mod_base = um
  modified_base 8: mod_base = OTHER; note = 2'-fluorocytidine
  modified_base 9: mod_base = um
  modified_base 10: mod_base = OTHER; note = 2'-fluoroguanosine
  modified_base 11: mod_base = gm
  modified_base 12: mod_base = OTHER; note = 2'-fluorouridine
  modified_base 13: mod_base = OTHER; note = 2'-O-methyladenosine
  modified_base 14: mod_base = OTHER; note = 2'-fluoroguanosine
  modified_base 15: mod_base = um
  modified_base 16: mod_base = OTHER; note = 2'-fluorouridine
  modified_base 17: mod_base = gm
  modified_base 18: mod_base = OTHER; note = 2'-fluorouridine
  modified_base 19: mod_base = OTHER; note = 2'-O-methyladenosine
  modified_base 20: mod_base = OTHER; note = 2'-fluoroguanosine
  modified_base 20^21: mod_base = OTHER; note = phosphorothioate linkage
  modified_base 21: mod_base = cm
  source 1..21: mol_type = other RNA
tcctgatctggtagttgtagc

SEQ ID NO: 1084 - RNA, 21 nt, synthetic construct
  modified_base 1: mod_base = um
  modified_base 1^2: mod_base = OTHER; note = phosphorothioate linkage
  modified_base 2: mod_base = OTHER; note = 2'-fluoroadenosine
  modified_base 2^3: mod_base = OTHER; note = phosphorothioate linkage
  modified_base 3: mod_base = gm
  modified_base 3^4: mod_base = OTHER; note = phosphorothioate linkage
  modified_base 4: mod_base = OTHER; note = 2'-fluorouridine
  modified_base 5: mod_base = um
  modified_base 6: mod_base = OTHER; note = 2'-fluoroguanosine
  modified_base 7: mod_base = um
  modified_base 8: mod_base = OTHER; note = 2'-fluoroadenosine
  modified_base 9: mod_base = gm
  modified_base 10: mod_base = OTHER; note = 2'-fluorocytidine
  modified_base 11: mod_base = OTHER; note = 2'-O-methyladenosine
  modified_base 12: mod_base = OTHER; note = 2'-fluoroguanosine
  modified_base 13: mod_base = OTHER; note = 2'-O-methyladenosine
  modified_base 14: mod_base = OTHER; note = 2'-fluorouridine
  modified_base 15: mod_base = gm
  modified_base 16: mod_base = OTHER; note = 2'-fluoroguanosine
  modified_base 17: mod_base = gm
  modified_base 18: mod_base = OTHER; note = 2'-fluorouridine
  modified_base 19: mod_base = gm
  modified_base 20: mod_base = OTHER; note = 2'-fluoroguanosine
  modified_base 20^21: mod_base = OTHER; note = phosphorothioate linkage
  modified_base 21: mod_base = gm
  source 1..21: mol_type = other RNA
tagttgtagcagatgggtggg

SEQ ID NO: 1085 - RNA, 21 nt, synthetic construct
  modified_base 1: mod_base = um
  modified_base 1^2: mod_base = OTHER; note = phosphorothioate linkage
  modified_base 2: mod_base = OTHER; note = 2'-fluorocytidine
  modified_base 2^3: mod_base = OTHER; note = phosphorothioate linkage
  modified_base 3: mod_base = OTHER; note = 2'-O-methyladenosine
  modified_base 3^4: mod_base = OTHER; note = phosphorothioate linkage
  modified_base 4: mod_base = OTHER; note = 2'-fluoroadenosine
  modified_base 5: mod_base = cm
  modified_base 6: mod_base = OTHER; note = 2'-fluoroadenosine
  modified_base 7: mod_base = cm
  modified_base 8: mod_base = OTHER; note = 2'-fluorouridine
  modified_base 9: mod_base = gm
  modified_base 10: mod_base = OTHER; note = 2'-fluoroguanosine
  modified_base 11: mod_base = OTHER; note = 2'-O-methyladenosine
  modified_base 12: mod_base = OTHER; note = 2'-fluorouridine
  modified_base 13: mod_base = gm
  modified_base 14: mod_base = OTHER; note = 2'-fluorocytidine
  modified_base 15: mod_base = gm
  modified_base 16: mod_base = OTHER; note = 2'-fluoroguanosine
  modified_base 17: mod_base = OTHER; note = 2'-O-methyladenosine
  modified_base 18: mod_base = OTHER; note = 2'-fluorouridine
  modified_base 19: mod_base = cm
  modified_base 20: mod_base = OTHER; note = 2'-fluorouridine
  modified_base 20^21: mod_base = OTHER; note = phosphorothioate linkage
  modified_base 21: mod_base = cm
  source 1..21: mol_type = other RNA
tcaacactggatgcggatctc

SEQ ID NO: 1086 - RNA, 21 nt, synthetic construct
  modified_base 1: mod_base = um
  modified_base 1^2: mod_base = OTHER; note = phosphorothioate linkage
  modified_base 2: mod_base = OTHER; note = 2'-fluorouridine
  modified_base 2^3: mod_base = OTHER; note = phosphorothioate linkage
  modified_base 3: mod_base = gm
  modified_base 3^4: mod_base = OTHER; note = phosphorothioate linkage
  modified_base 4: mod_base = OTHER; note = 2'-fluorouridine
  modified_base 5: mod_base = um
  modified_base 6: mod_base = OTHER; note = 2'-fluorocytidine
  modified_base 7: mod_base = gm
  modified_base 8: mod_base = OTHER; note = 2'-fluoroadenosine
  modified_base 9: mod_base = um
  modified_base 10: mod_base = OTHER; note = 2'-fluoroguanosine
  modified_base 11: mod_base = cm
  modified_base 12: mod_base = OTHER; note = 2'-fluorouridine
  modified_base 13: mod_base = cm
  modified_base 14: mod_base = OTHER; note = 2'-fluoroadenosine
  modified_base 15: mod_base = cm
  modified_base 16: mod_base = OTHER; note = 2'-fluorocytidine
  modified_base 17: mod_base = um
  modified_base 18: mod_base = OTHER; note = 2'-fluorocytidine
  modified_base 19: mod_base = um
  modified_base 20: mod_base = OTHER; note = 2'-fluoroguanosine
  modified_base 20^21: mod_base = OTHER; note = phosphorothioate linkage
  modified_base 21: mod_base = gm
  source 1..21: mol_type = other RNA
ttgttcgatgctcacctctgg

SEQ ID NO: 1087 - RNA, 21 nt, synthetic construct
  modified_base 1: mod_base = um
  modified_base 1^2: mod_base = OTHER; note = phosphorothioate linkage
  modified_base 2: mod_base = OTHER; note = 2'-fluoroadenosine
  modified_base 2^3: mod_base = OTHER; note = phosphorothioate linkage
  modified_base 3: mod_base = um
  modified_base 3^4: mod_base = OTHER; note = phosphorothioate linkage
  modified_base 4: mod_base = OTHER; note = 2'-fluorocytidine
  modified_base 5: mod_base = um
  modified_base 6: mod_base = OTHER; note = 2'-fluorouridine
  modified_base 7: mod_base = gm
  modified_base 8: mod_base = OTHER; note = 2'-fluoroadenosine
  modified_base 9: mod_base = OTHER; note = 2'-O-methyladenosine
  modified_base 10: mod_base = OTHER; note = 2'-fluoroguanosine
  modified_base 11: mod_base = gm
  modified_base 12: mod_base = OTHER; note = 2'-fluoroguanosine
  modified_base 13: mod_base = um
  modified_base 14: mod_base = OTHER; note = 2'-fluorocytidine
  modified_base 15: mod_base = cm
  modified_base 16: mod_base = OTHER; note = 2'-fluorocytidine
  modified_base 17: mod_base = um
  modified_base 18: mod_base = OTHER; note = 2'-fluoroguanosine
  modified_base 19: mod_base = cm
  modified_base 20: mod_base = OTHER; note = 2'-fluorouridine
  modified_base 20^21: mod_base = OTHER; note = phosphorothioate linkage
  modified_base 21: mod_base = gm
  source 1..21: mol_type = other RNA
tatcttgaagggtccctgctg

SEQ ID NO: 1088 - RNA, 21 nt, synthetic construct
  modified_base 1: mod_base = um
  modified_base 1^2: mod_base = OTHER; note = phosphorothioate linkage
  modified_base 2: mod_base = OTHER; note = 2'-fluorocytidine
  modified_base 2^3: mod_base = OTHER; note = phosphorothioate linkage
  modified_base 3: mod_base = gm
  modified_base 3^4: mod_base = OTHER; note = phosphorothioate linkage
  modified_base 4: mod_base = OTHER; note = 2'-fluorouridine
  modified_base 5: mod_base = OTHER; note = 2'-O-methyladenosine
  modified_base 6: mod_base = OTHER; note = 2'-fluoroguanosine
  modified_base 7: mod_base = um
  modified_base 8: mod_base = OTHER; note = 2'-fluorouridine
  modified_base 9: mod_base = gm
  modified_base 10: mod_base = OTHER; note = 2'-fluoroadenosine
  modified_base 11: mod_base = gm
  modified_base 12: mod_base = OTHER; note = 2'-fluoroguanosine
  modified_base 13: mod_base = cm
  modified_base 14: mod_base = OTHER; note = 2'-fluoroadenosine
  modified_base 15: mod_base = cm
  modified_base 16: mod_base = OTHER; note = 2'-fluoroadenosine
  modified_base 17: mod_base = um
  modified_base 18: mod_base = OTHER; note = 2'-fluorocytidine
  modified_base 19: mod_base = um
  modified_base 20: mod_base = OTHER; note = 2'-fluorouridine
  modified_base 20^21: mod_base = OTHER; note = phosphorothioate linkage
  modified_base 21: mod_base = gm
  source 1..21: mol_type = other RNA
tcgtagttgaggcacatcttg

SEQ ID NO: 1089 - RNA, 21 nt, synthetic construct
  modified_base 1: mod_base = um
  modified_base 1^2: mod_base = OTHER; note = phosphorothioate linkage
  modified_base 2: mod_base = OTHER; note = 2'-fluorocytidine
  modified_base 2^3: mod_base = OTHER; note = phosphorothioate linkage
  modified_base 3: mod_base = um
  modified_base 3^4: mod_base = OTHER; note = phosphorothioate linkage
  modified_base 4: mod_base = OTHER; note = 2'-fluorocytidine
  modified_base 5: mod_base = gm
  modified_base 6: mod_base = OTHER; note = 2'-fluorouridine
  modified_base 7: mod_base = OTHER; note = 2'-O-methyladenosine
  modified_base 8: mod_base = OTHER; note = 2'-fluoroguanosine
  modified_base 9: mod_base = um
  modified_base 10: mod_base = OTHER; note = 2'-fluorouridine
  modified_base 11: mod_base = gm
  modified_base 12: mod_base = OTHER; note = 2'-fluoroadenosine
  modified_base 13: mod_base = gm
  modified_base 14: mod_base = OTHER; note = 2'-fluoroguanosine
  modified_base 15: mod_base = cm
  modified_base 16: mod_base = OTHER; note = 2'-fluoroadenosine
  modified_base 17: mod_base = cm
  modified_base 18: mod_base = OTHER; note = 2'-fluoroadenosine
  modified_base 19: mod_base = um
  modified_base 20: mod_base = OTHER; note = 2'-fluorocytidine
  modified_base 20^21: mod_base = OTHER; note = phosphorothioate linkage
  modified_base 21: mod_base = cm
  source 1..21: mol_type = other RNA
tctcgtagttgaggcacatcc

SEQ ID NO: 1090 - RNA, 21 nt, synthetic construct
  modified_base 1: mod_base = OTHER; note = 2'-O-methyladenosine
  modified_base 1^2: mod_base = OTHER; note = phosphorothioate linkage
  modified_base 2: mod_base = OTHER; note = 2'-fluoroadenosine
  modified_base 2^3: mod_base = OTHER; note = phosphorothioate linkage
  modified_base 3: mod_base = gm
  modified_base 3^4: mod_base = OTHER; note = phosphorothioate linkage
  modified_base 4: mod_base = OTHER; note = 2'-fluoroguanosine
  modified_base 5: mod_base = um
  modified_base 6: mod_base = OTHER; note = 2'-fluorocytidine
  modified_base 7: mod_base = um
  modified_base 8: mod_base = OTHER; note = 2'-fluorouridine
  modified_base 9: mod_base = gm
  modified_base 10: mod_base = OTHER; note = 2'-fluorouridine
  modified_base 11: mod_base = OTHER; note = 2'-O-methyladenosine
  modified_base 12: mod_base = OTHER; note = 2'-fluoroguanosine
  modified_base 13: mod_base = um
  modified_base 14: mod_base = OTHER; note = 2'-fluoroguanosine
  modified_base 15: mod_base = gm
  modified_base 16: mod_base = OTHER; note = 2'-fluoroadenosine
  modified_base 17: mod_base = OTHER; note = 2'-O-methyladenosine
  modified_base 18: mod_base = OTHER; note = 2'-fluoroguanosine
  modified_base 19: mod_base = cm
  modified_base 20: mod_base = OTHER; note = 2'-fluorouridine
  modified_base 20^21: mod_base = OTHER; note = phosphorothioate linkage
  modified_base 21: mod_base = gm
  source 1..21: mol_type = other RNA
aaggtcttgtagtggaagctg

SEQ ID NO: 1091 - RNA, 21 nt, synthetic construct
  modified_base 1: mod_base = um
  modified_base 1^2: mod_base = OTHER; note = phosphorothioate linkage
  modified_base 2: mod_base = OTHER; note = 2'-fluorouridine
  modified_base 2^3: mod_base = OTHER; note = phosphorothioate linkage
  modified_base 3: mod_base = um
  modified_base 3^4: mod_base = OTHER; note = phosphorothioate linkage
  modified_base 4: mod_base = OTHER; note = 2'-fluorocytidine
  modified_base 5: mod_base = OTHER; note = 2'-O-methyladenosine
  modified_base 6: mod_base = OTHER; note = 2'-fluoroguanosine
  modified_base 7: mod_base = gm
  modified_base 8: mod_base = OTHER; note = 2'-fluorocytidine
  modified_base 9: mod_base = OTHER; note = 2'-O-methyladenosine
  modified_base 10: mod_base = OTHER; note = 2'-fluoroguanosine
  modified_base 11: mod_base = gm
  modified_base 12: mod_base = OTHER; note = 2'-fluorouridine
  modified_base 13: mod_base = cm
  modified_base 14: mod_base = OTHER; note = 2'-fluorouridine
  modified_base 15: mod_base = cm
  modified_base 16: mod_base = OTHER; note = 2'-fluoroguanosine
  modified_base 17: mod_base = cm
  modified_base 18: mod_base = OTHER; note = 2'-fluorouridine
  modified_base 19: mod_base = gm
  modified_base 20: mod_base = OTHER; note = 2'-fluorouridine
  modified_base 20^21: mod_base = OTHER; note = phosphorothioate linkage
  modified_base 21: mod_base = cm
  source 1..21: mol_type = other RNA
tttcaggcaggtctcgctgtc

SEQ ID NO: 1092 - RNA, 21 nt, synthetic construct
  modified_base 1: mod_base = um
  modified_base 1^2: mod_base = OTHER; note = phosphorothioate linkage
  modified_base 2: mod_base = OTHER; note = 2'-fluorouridine
  modified_base 2^3: mod_base = OTHER; note = phosphorothioate linkage
  modified_base 3: mod_base = cm
  modified_base 3^4: mod_base = OTHER; note = phosphorothioate linkage
  modified_base 4: mod_base = OTHER; note = 2'-fluorouridine
  modified_base 5: mod_base = gm
  modified_base 6: mod_base = OTHER; note = 2'-fluoroadenosine
  modified_base 7: mod_base = OTHER; note = 2'-O-methyladenosine
  modified_base 8: mod_base = OTHER; note = 2'-fluoroguanosine
  modified_base 9: mod_base = OTHER; note = 2'-O-methyladenosine
  modified_base 10: mod_base = OTHER; note = 2'-fluorouridine
  modified_base 11: mod_base = gm
  modified_base 12: mod_base = OTHER; note = 2'-fluoroguanosine
  modified_base 13: mod_base = um
  modified_base 14: mod_base = OTHER; note = 2'-fluoroguanosine
  modified_base 15: mod_base = OTHER; note = 2'-O-methyladenosine
  modified_base 16: mod_base = OTHER; note = 2'-fluorocytidine
  modified_base 17: mod_base = gm
  modified_base 18: mod_base = OTHER; note = 2'-fluorouridine
  modified_base 19: mod_base = um
  modified_base 20: mod_base = OTHER; note = 2'-fluoroguanosine
  modified_base 20^21: mod_base = OTHER; note = phosphorothioate linkage
  modified_base 21: mod_base = gm
  source 1..21: mol_type = other RNA
ttctgaagatggtgacgttgg

SEQ ID NO: 1093 - RNA, 21 nt, synthetic construct
  modified_base 1: mod_base = um
  modified_base 1^2: mod_base = OTHER; note = phosphorothioate linkage
  modified_base 2: mod_base = OTHER; note = 2'-fluoroguanosine
  modified_base 2^3: mod_base = OTHER; note = phosphorothioate linkage
  modified_base 3: mod_base = um
  modified_base 3^4: mod_base = OTHER; note = phosphorothioate linkage
  modified_base 4: mod_base = OTHER; note = 2'-fluorocytidine
  modified_base 5: mod_base = um
  modified_base 6: mod_base = OTHER; note = 2'-fluoroguanosine
  modified_base 7: mod_base = OTHER; note = 2'-O-methyladenosine
  modified_base 8: mod_base = OTHER; note = 2'-fluoroadenosine
  modified_base 9: mod_base = gm
  modified_base 10: mod_base = OTHER; note = 2'-fluoroadenosine
  modified_base 11: mod_base = um
  modified_base 12: mod_base = OTHER; note = 2'-fluoroguanosine
  modified_base 13: mod_base = gm
  modified_base 14: mod_base = OTHER; note = 2'-fluorouridine
  modified_base 15: mod_base = gm
  modified_base 16: mod_base = OTHER; note = 2'-fluoroadenosine
  modified_base 17: mod_base = cm
  modified_base 18: mod_base = OTHER; note = 2'-fluoroguanosine
  modified_base 19: mod_base = um
  modified_base 20: mod_base = OTHER; note = 2'-fluorouridine
  modified_base 20^21: mod_base = OTHER; note = phosphorothioate linkage
  modified_base 21: mod_base = gm
  source 1..21: mol_type = other RNA
tgtctgaagatggtgacgttg

SEQ ID NO: 1094 - RNA, 21 nt, synthetic construct
  modified_base 1: mod_base = um
  modified_base 1^2: mod_base = OTHER; note = phosphorothioate linkage
  modified_base 2: mod_base = OTHER; note = 2'-fluoroguanosine
  modified_base 2^3: mod_base = OTHER; note = phosphorothioate linkage
  modified_base 3: mod_base = gm
  modified_base 3^4: mod_base = OTHER; note = phosphorothioate linkage
  modified_base 4: mod_base = OTHER; note = 2'-fluoroadenosine
  modified_base 5: mod_base = OTHER; note = 2'-O-methyladenosine
  modified_base 6: mod_base = OTHER; note = 2'-fluoroguanosine
  modified_base 7: mod_base = OTHER; note = 2',3'-seco-uridine
  modified_base 8: mod_base = OTHER; note = 2'-fluorocytidine
  modified_base 9: mod_base = OTHER; note = 2'-O-methyladenosine
  modified_base 10: mod_base = OTHER; note = 2'-fluorouridine
  modified_base 11: mod_base = cm
  modified_base 12: mod_base = OTHER; note = 2'-fluoroguanosine
  modified_base 13: mod_base = gm
  modified_base 14: mod_base = OTHER; note = 2'-fluorocytidine
  modified_base 15: mod_base = cm
  modified_base 16: mod_base = OTHER; note = 2'-fluorouridine
  modified_base 17: mod_base = gm
  modified_base 18: mod_base = OTHER; note = 2'-fluoroguanosine
  modified_base 19: mod_base = OTHER; note = 2'-O-methyladenosine
  modified_base 20: mod_base = OTHER; note = 2'-fluorouridine
  modified_base 20^21: mod_base = OTHER; note = phosphorothioate linkage
  modified_base 21: mod_base = gm
  source 1..21: mol_type = other RNA
tggaagtcatcggcctggatg

SEQ ID NO: 1095 - RNA, 21 nt, synthetic construct
  modified_base 1: mod_base = um
  modified_base 1^2: mod_base = OTHER; note = phosphorothioate linkage
  modified_base 2: mod_base = OTHER; note = 2'-fluorouridine
  modified_base 2^3: mod_base = OTHER; note = phosphorothioate linkage
  modified_base 3: mod_base = um
  modified_base 3^4: mod_base = OTHER; note = phosphorothioate linkage
  modified_base 4: mod_base = OTHER; note = 2'-fluoroguanosine
  modified_base 5: mod_base = OTHER; note = 2'-O-methyladenosine
  modified_base 6: mod_base = OTHER; note = 2'-fluoroadenosine
  modified_base 7: mod_base = gm
  modified_base 8: mod_base = gm
  modified_base 9: mod_base = um
  modified_base 10: mod_base = gm
  modified_base 11: mod_base = um
  modified_base 12: mod_base = OTHER; note = 2'-fluorouridine
  modified_base 13: mod_base = gm
  modified_base 14: mod_base = OTHER; note = 2'-fluoroadenosine
  modified_base 15: mod_base = OTHER; note = 2'-O-methyladenosine
  modified_base 16: mod_base = OTHER; note = 2'-fluoroguanosine
  modified_base 17: mod_base = OTHER; note = 2'-O-methyladenosine
  modified_base 18: mod_base = OTHER; note = 2'-fluoroadenosine
  modified_base 19: mod_base = gm
  modified_base 20: mod_base = OTHER; note = 2'-fluoroguanosine
  modified_base 20^21: mod_base = OTHER; note = phosphorothioate linkage
  modified_base 21: mod_base = cm
  source 1..21: mol_type = other RNA
tttgaaggtgttgaagaaggc

SEQ ID NO: 1096 - RNA, 21 nt, synthetic construct
  modified_base 1: mod_base = um
  modified_base 1^2: mod_base = OTHER; note = phosphorothioate linkage
  modified_base 2: mod_base = OTHER; note = 2'-fluoroguanosine
  modified_base 2^3: mod_base = OTHER; note = phosphorothioate linkage
  modified_base 3: mod_base = cm
  modified_base 3^4: mod_base = OTHER; note = phosphorothioate linkage
  modified_base 4: mod_base = OTHER; note = 2'-fluoroadenosine
  modified_base 5: mod_base = gm
  modified_base 6: mod_base = OTHER; note = 2'-fluorouridine
  modified_base 7: mod_base = um
  modified_base 8: mod_base = OTHER; note = 2'-fluorocytidine
  modified_base 9: mod_base = gm
  modified_base 10: mod_base = OTHER; note = 2'-fluoroadenosine
  modified_base 11: mod_base = gm
  modified_base 12: mod_base = OTHER; note = 2'-fluorouridine
  modified_base 13: mod_base = OTHER; note = 2'-O-methyladenosine
  modified_base 14: mod_base = OTHER; note = 2'-fluoroguanosine
  modified_base 15: mod_base = um
  modified_base 16: mod_base = OTHER; note = 2'-fluoroadenosine
  modified_base 17: mod_base = gm
  modified_base 18: mod_base = OTHER; note = 2'-fluoroguanosine
  modified_base 19: mod_base = um
  modified_base 20: mod_base = OTHER; note = 2'-fluorouridine
  modified_base 20^21: mod_base = OTHER; note = phosphorothioate linkage
  modified_base 21: mod_base = cm
  source 1..21: mol_type = other RNA
tgcagttcgagtagtaggttc

SEQ ID NO: 1097 - RNA, 21 nt, synthetic construct
  modified_base 1: mod_base = um
  modified_base 1^2: mod_base = OTHER; note = phosphorothioate linkage
  modified_base 2: mod_base = OTHER; note = 2'-fluorouridine
  modified_base 2^3: mod_base = OTHER; note = phosphorothioate linkage
  modified_base 3: mod_base = um
  modified_base 3^4: mod_base = OTHER; note = phosphorothioate linkage
  modified_base 4: mod_base = OTHER; note = 2'-fluoroguanosine
  modified_base 5: mod_base = gm
  modified_base 6: mod_base = OTHER; note = 2'-fluoroadenosine
  modified_base 7: mod_base = gm
  modified_base 8: mod_base = OTHER; note = 2'-fluorocytidine
  modified_base 9: mod_base = OTHER; note = 2'-O-methyladenosine
  modified_base 10: mod_base = OTHER; note = 2'-fluoroguanosine
  modified_base 11: mod_base = gm
  modified_base 12: mod_base = OTHER; note = 2'-fluorouridine
  modified_base 13: mod_base = gm
  modified_base 14: mod_base = OTHER; note = 2'-fluoroguanosine
  modified_base 15: mod_base = um
  modified_base 16: mod_base = OTHER; note = 2'-fluorocytidine
  modified_base 17: mod_base = cm
  modified_base 18: mod_base = OTHER; note = 2'-fluorocytidine
  modified_base 19: mod_base = um
  modified_base 20: mod_base = OTHER; note = 2'-fluoroguanosine
  modified_base 20^21: mod_base = OTHER; note = phosphorothioate linkage
  modified_base 21: mod_base = um
  source 1..21: mol_type = other RNA
tttggagcaggtggtccctgt

SEQ ID NO: 1098 - RNA, 21 nt, synthetic construct
  modified_base 1: mod_base = um
  modified_base 1^2: mod_base = OTHER; note = phosphorothioate linkage
  modified_base 2: mod_base = OTHER; note = 2'-fluorocytidine
  modified_base 2^3: mod_base = OTHER; note = phosphorothioate linkage
  modified_base 3: mod_base = um
  modified_base 3^4: mod_base = OTHER; note = phosphorothioate linkage
  modified_base 4: mod_base = OTHER; note = 2'-fluorouridine
  modified_base 5: mod_base = gm
  modified_base 6: mod_base = OTHER; note = 2'-fluoroadenosine
  modified_base 7: mod_base = um
  modified_base 8: mod_base = OTHER; note = 2'-fluoroguanosine
  modified_base 9: mod_base = gm
  modified_base 10: mod_base = OTHER; note = 2'-fluorocytidine
  modified_base 11: mod_base = cm
  modified_base 12: mod_base = OTHER; note = 2'-fluorouridine
  modified_base 13: mod_base = um
  modified_base 14: mod_base = OTHER; note = 2'-fluoroguanosine
  modified_base 15: mod_base = gm
  modified_base 16: mod_base = OTHER; note = 2'-fluoroadenosine
  modified_base 17: mod_base = gm
  modified_base 18: mod_base = OTHER; note = 2'-fluorocytidine
  modified_base 19: mod_base = OTHER; note = 2'-O-methyladenosine
  modified_base 20: mod_base = OTHER; note = 2'-fluoroguanosine
  modified_base 20^21: mod_base = OTHER; note = phosphorothioate linkage
  modified_base 21: mod_base = gm
  source 1..21: mol_type = other RNA
tcttgatggccttggagcagg

SEQ ID NO: 1099 - RNA, 21 nt, synthetic construct
  modified_base 1: mod_base = um
  modified_base 1^2: mod_base = OTHER; note = phosphorothioate linkage
  modified_base 2: mod_base = OTHER; note = 2'-fluorouridine
  modified_base 2^3: mod_base = OTHER; note = phosphorothioate linkage
  modified_base 3: mod_base = gm
  modified_base 3^4: mod_base = OTHER; note = phosphorothioate linkage
  modified_base 4: mod_base = OTHER; note = 2'-fluorouridine
  modified_base 5: mod_base = cm
  modified_base 6: mod_base = OTHER; note = 2'-fluoroadenosine
  modified_base 7: mod_base = um
  modified_base 8: mod_base = OTHER; note = 2'-fluorocytidine
  modified_base 9: mod_base = gm
  modified_base 10: mod_base = OTHER; note = 2'-fluorouridine
  modified_base 11: mod_base = gm
  modified_base 12: mod_base = OTHER; note = 2'-fluoroguanosine
  modified_base 13: mod_base = um
  modified_base 14: mod_base = OTHER; note = 2'-fluorouridine
  modified_base 15: mod_base = cm
  modified_base 16: mod_base = OTHER; note = 2'-fluorocytidine
  modified_base 17: mod_base = OTHER; note = 2'-O-methyladenosine
  modified_base 18: mod_base = OTHER; note = 2'-fluorocytidine
  modified_base 19: mod_base = OTHER; note = 2'-O-methyladenosine
  modified_base 20: mod_base = OTHER; note = 2'-fluorouridine
  modified_base 20^21: mod_base = OTHER; note = phosphorothioate linkage
  modified_base 21: mod_base = gm
  source 1..21: mol_type = other RNA
ttgtcatcgtggttccacatg

SEQ ID NO: 1100 - RNA, 21 nt, synthetic construct
  modified_base 1: mod_base = OTHER; note = 2'-O-methyladenosine
  modified_base 1^2: mod_base = OTHER; note = phosphorothioate linkage
  modified_base 2: mod_base = OTHER; note = 2'-fluorocytidine
  modified_base 2^3: mod_base = OTHER; note = phosphorothioate linkage
  modified_base 3: mod_base = OTHER; note = 2'-O-methyladenosine
  modified_base 3^4: mod_base = OTHER; note = phosphorothioate linkage
  modified_base 4: mod_base = OTHER; note = 2'-fluoroguanosine
  modified_base 5: mod_base = OTHER; note = 2'-O-methyladenosine
  modified_base 6: mod_base = OTHER; note = 2'-fluoroadenosine
  modified_base 7: mod_base = gm
  modified_base 8: mod_base = OTHER; note = 2'-fluorocytidine
  modified_base 9: mod_base = OTHER; note = 2'-O-methyladenosine
  modified_base 10: mod_base = OTHER; note = 2'-fluoroguanosine
  modified_base 11: mod_base = OTHER; note = 2'-O-methyladenosine
  modified_base 12: mod_base = OTHER; note = 2'-fluoroguanosine
  modified_base 13: mod_base = gm
  modified_base 14: mod_base = OTHER; note = 2'-fluorouridine
  modified_base 15: mod_base = cm
  modified_base 16: mod_base = OTHER; note = 2'-fluorouridine
  modified_base 17: mod_base = um
  modified_base 18: mod_base = OTHER; note = 2'-fluoroguanosine
  modified_base 19: mod_base = cm
  modified_base 20: mod_base = OTHER; note = 2'-fluorocytidine
  modified_base 20^21: mod_base = OTHER; note = phosphorothioate linkage
  modified_base 21: mod_base = um
  source 1..21: mol_type = other RNA
acagaagcagaggtcttgcct

SEQ ID NO: 1101 - RNA, 21 nt, synthetic construct
  modified_base 1: mod_base = um
  modified_base 1^2: mod_base = OTHER; note = phosphorothioate linkage
  modified_base 2: mod_base = OTHER; note = 2'-fluorocytidine
  modified_base 2^3: mod_base = OTHER; note = phosphorothioate linkage
  modified_base 3: mod_base = OTHER; note = 2'-O-methyladenosine
  modified_base 3^4: mod_base = OTHER; note = phosphorothioate linkage
  modified_base 4: mod_base = OTHER; note = 2'-fluoroguanosine
  modified_base 5: mod_base = um
  modified_base 6: mod_base = OTHER; note = 2'-fluorouridine
  modified_base 7: mod_base = gm
  modified_base 8: mod_base = OTHER; note = 2'-fluoroguanosine
  modified_base 9: mod_base = um
  modified_base 10: mod_base = OTHER; note = 2'-fluoroguanosine
  modified_base 11: mod_base = cm
  modified_base 12: mod_base = OTHER; note = 2'-fluoroadenosine
  modified_base 13: mod_base = gm
  modified_base 14: mod_base = OTHER; note = 2'-fluorouridine
  modified_base 15: mod_base = cm
  modified_base 16: mod_base = OTHER; note = 2'-fluorouridine
  modified_base 17: mod_base = gm
  modified_base 18: mod_base = OTHER; note = 2'-fluorouridine
  modified_base 19: mod_base = gm
  modified_base 20: mod_base = OTHER; note = 2'-fluoroguanosine
  modified_base 20^21: mod_base = OTHER; note = phosphorothioate linkage
  modified_base 21: mod_base = OTHER; note = 2'-O-methyladenosine
  source 1..21: mol_type = other RNA
tcagttggtgcagtctgtgga

SEQ ID NO: 1102 - RNA, 21 nt, synthetic construct
  modified_base 1: mod_base = um
  modified_base 1^2: mod_base = OTHER; note = phosphorothioate linkage
  modified_base 2: mod_base = OTHER; note = 2'-fluorocytidine
  modified_base 2^3: mod_base = OTHER; note = phosphorothioate linkage
  modified_base 3: mod_base = OTHER; note = 2'-O-methyladenosine
  modified_base 3^4: mod_base = OTHER; note = phosphorothioate linkage
  modified_base 4: mod_base = OTHER; note = 2'-fluoroguanosine
  modified_base 5: mod_base = um
  modified_base 6: mod_base = OTHER; note = 2'-fluoroadenosine
  modified_base 7: mod_base = cm
  modified_base 8: mod_base = OTHER; note = 2'-fluoroadenosine
  modified_base 9: mod_base = gm
  modified_base 10: mod_base = OTHER; note = 2'-fluorouridine
  modified_base 11: mod_base = gm
  modified_base 12: mod_base = OTHER; note = 2'-fluoroadenosine
  modified_base 13: mod_base = OTHER; note = 2'-O-methyladenosine
  modified_base 14: mod_base = OTHER; note = 2'-fluoroguanosine
  modified_base 15: mod_base = gm
  modified_base 16: mod_base = OTHER; note = 2'-fluorocytidine
  modified_base 17: mod_base = OTHER; note = 2'-O-methyladenosine
  modified_base 18: mod_base = OTHER; note = 2'-fluorocytidine
  modified_base 19: mod_base = um
  modified_base 20: mod_base = OTHER; note = 2'-fluoroguanosine
  modified_base 20^21: mod_base = OTHER; note = phosphorothioate linkage
  modified_base 21: mod_base = cm
  source 1..21: mol_type = other RNA
tcagtacagtgaaggcactgc

SEQ ID NO: 1103 - RNA, 21 nt, synthetic construct
  modified_base 1: mod_base = um
  modified_base 1^2: mod_base = OTHER; note = phosphorothioate linkage
  modified_base 2: mod_base = OTHER; note = 2'-fluoroguanosine
  modified_base 2^3: mod_base = OTHER; note = phosphorothioate linkage
  modified_base 3: mod_base = cm
  modified_base 3^4: mod_base = OTHER; note = phosphorothioate linkage
  modified_base 4: mod_base = OTHER; note = 2'-fluorouridine
  modified_base 5: mod_base = gm
  modified_base 6: mod_base = OTHER; note = 2'-fluorouridine
  modified_base 7: mod_base = um
  modified_base 8: mod_base = OTHER; note = 2'-fluoroguanosine
  modified_base 9: mod_base = OTHER; note = 2'-O-methyladenosine
  modified_base 10: mod_base = OTHER; note = 2'-fluoroadenosine
  modified_base 11: mod_base = gm
  modified_base 12: mod_base = OTHER; note = 2'-fluorouridine
  modified_base 13: mod_base = um
  modified_base 14: mod_base = OTHER; note = 2'-fluorocytidine
  modified_base 15: mod_base = cm
  modified_base 16: mod_base = OTHER; note = 2'-fluorocytidine
  modified_base 17: mod_base = OTHER; note = 2'-O-methyladenosine
  modified_base 18: mod_base = OTHER; note = 2'-fluorocytidine
  modified_base 19: mod_base = OTHER; note = 2'-O-methyladenosine
  modified_base 20: mod_base = OTHER; note = 2'-fluoroguanosine
  modified_base 20^21: mod_base = OTHER; note = phosphorothioate linkage
  modified_base 21: mod_base = cm
  source 1..21: mol_type = other RNA
tgctgttgaagttcccacagc

SEQ ID NO: 1104 - RNA, 21 nt, synthetic construct
  modified_base 1: mod_base = um
  modified_base 1^2: mod_base = OTHER; note = phosphorothioate linkage
  modified_base 2: mod_base = OTHER; note = 2'-fluoroguanosine
  modified_base 2^3: mod_base = OTHER; note = phosphorothioate linkage
  modified_base 3: mod_base = OTHER; note = 2'-O-methyladenosine
  modified_base 3^4: mod_base = OTHER; note = phosphorothioate linkage
  modified_base 4: mod_base = OTHER; note = 2'-fluorouridine
  modified_base 5: mod_base = gm
  modified_base 6: mod_base = OTHER; note = 2'-fluorocytidine
  modified_base 7: mod_base = um
  modified_base 8: mod_base = OTHER; note = 2'-fluoroguanosine
  modified_base 9: mod_base = um
  modified_base 10: mod_base = OTHER; note = 2'-fluorouridine
  modified_base 11: mod_base = gm
  modified_base 12: mod_base = OTHER; note = 2'-fluoroadenosine
  modified_base 13: mod_base = OTHER; note = 2'-O-methyladenosine
  modified_base 14: mod_base = OTHER; note = 2'-fluoroguanosine
  modified_base 15: mod_base = um
  modified_base 16: mod_base = OTHER; note = 2'-fluorouridine
  modified_base 17: mod_base = cm
  modified_base 18: mod_base = OTHER; note = 2'-fluorocytidine
  modified_base 19: mod_base = cm
  modified_base 20: mod_base = OTHER; note = 2'-fluoroadenosine
  modified_base 20^21: mod_base = OTHER; note = phosphorothioate linkage
  modified_base 21: mod_base = cm
  source 1..21: mol_type = other RNA
tgatgctgttgaagttcccac

SEQ ID NO: 1105 - RNA, 21 nt, synthetic construct
  modified_base 1: mod_base = um
  modified_base 1^2: mod_base = OTHER; note = phosphorothioate linkage
  modified_base 2: mod_base = OTHER; note = 2'-fluoroguanosine
  modified_base 2^3: mod_base = OTHER; note = phosphorothioate linkage
  modified_base 3: mod_base = gm
  modified_base 3^4: mod_base = OTHER; note = phosphorothioate linkage
  modified_base 4: mod_base = OTHER; note = 2'-fluorouridine
  modified_base 5: mod_base = cm
  modified_base 6: mod_base = OTHER; note = 2'-fluorouridine
  modified_base 7: mod_base = um
  modified_base 8: mod_base = OTHER; note = 2'-fluoroguanosine
  modified_base 9: mod_base = OTHER; note = 2'-O-methyladenosine
  modified_base 10: mod_base = OTHER; note = 2'-fluoroadenosine
  modified_base 11: mod_base = gm
  modified_base 12: mod_base = OTHER; note = 2'-fluoroguanosine
  modified_base 13: mod_base = um
  modified_base 14: mod_base = OTHER; note = 2'-fluoroguanosine
  modified_base 15: mod_base = um
  modified_base 16: mod_base = OTHER; note = 2'-fluorouridine
  modified_base 17: mod_base = gm
  modified_base 18: mod_base = OTHER; note = 2'-fluoroadenosine
  modified_base 19: mod_base = OTHER; note = 2'-O-methyladenosine
  modified_base 20: mod_base = OTHER; note = 2'-fluoroguanosine
  modified_base 20^21: mod_base = OTHER; note = phosphorothioate linkage
  modified_base 21: mod_base = cm
  source 1..21: mol_type = other RNA
tggtcttgaaggtgttgaagc

SEQ ID NO: 1106 - RNA, 21 nt, synthetic construct
  modified_base 1: mod_base = OTHER; note = 2'-O-methyladenosine
  modified_base 1^2: mod_base = OTHER; note = phosphorothioate linkage
  modified_base 2: mod_base = OTHER; note = 2'-fluoroadenosine
  modified_base 2^3: mod_base = OTHER; note = phosphorothioate linkage
  modified_base 3: mod_base = gm
  modified_base 3^4: mod_base = OTHER; note = phosphorothioate linkage
  modified_base 4: mod_base = OTHER; note = 2'-fluorocytidine
  modified_base 5: mod_base = um
  modified_base 6: mod_base = OTHER; note = 2'-fluoroguanosine
  modified_base 7: mod_base = um
  modified_base 8: mod_base = OTHER; note = 2'-fluorouridine
  modified_base 9: mod_base = cm
  modified_base 10: mod_base = OTHER; note = 2'-fluorocytidine
  modified_base 11: mod_base = um
  modified_base 12: mod_base = OTHER; note = 2'-fluoroguanosine
  modified_base 13: mod_base = OTHER; note = 2'-O-methyladenosine
  modified_base 14: mod_base = OTHER; note = 2'-fluorouridine
  modified_base 15: mod_base = gm
  modified_base 16: mod_base = OTHER; note = 2'-fluorouridine
  modified_base 17: mod_base = um
  modified_base 18: mod_base = OTHER; note = 2'-fluoroguanosine
  modified_base 19: mod_base = gm
  modified_base 20: mod_base = OTHER; note = 2'-fluoroguanosine
  modified_base 20^21: mod_base = OTHER; note = phosphorothioate linkage
  modified_base 21: mod_base = gm
  source 1..21: mol_type = other RNA
aagctgttcctgatgttgggg

SEQ ID NO: 1107 - RNA, 21 nt, synthetic construct
  modified_base 1: mod_base = OTHER; note = 2'-O-methyladenosine
  modified_base 1^2: mod_base = OTHER; note = phosphorothioate linkage
  modified_base 2: mod_base = OTHER; note = 2'-fluorocytidine
  modified_base 2^3: mod_base = OTHER; note = phosphorothioate linkage
  modified_base 3: mod_base = OTHER; note = 2'-O-methyladenosine
  modified_base 3^4: mod_base = OTHER; note = phosphorothioate linkage
  modified_base 4: mod_base = OTHER; note = 2'-fluorouridine
  modified_base 5: mod_base = gm
  modified_base 6: mod_base = OTHER; note = 2'-fluorocytidine
  modified_base 7: mod_base = OTHER; note = 2'-O-methyladenosine
  modified_base 8: mod_base = OTHER; note = 2'-fluoroguanosine
  modified_base 9: mod_base = um
  modified_base 10: mod_base = OTHER; note = 2'-fluorouridine
  modified_base 11: mod_base = cm
  modified_base 12: mod_base = OTHER; note = 2'-fluoroguanosine
  modified_base 13: mod_base = OTHER; note = 2'-O-methyladenosine
  modified_base 14: mod_base = OTHER; note = 2'-fluoroguanosine
  modified_base 15: mod_base = um
  modified_base 16: mod_base = OTHER; note = 2'-fluoroadenosine
  modified_base 17: mod_base = gm
  modified_base 18: mod_base = OTHER; note = 2'-fluorouridine
  modified_base 19: mod_base = OTHER; note = 2'-O-methyladenosine
  modified_base 20: mod_base = OTHER; note = 2'-fluoroguanosine
  modified_base 20^21: mod_base = OTHER; note = phosphorothioate linkage
  modified_base 21: mod_base = gm
  source 1..21: mol_type = other RNA
acatgcagttcgagtagtagg

SEQ ID NO: 1108 - RNA, 21 nt, synthetic construct
  modified_base 1: mod_base = um
  modified_base 1^2: mod_base = OTHER; note = phosphorothioate linkage
  modified_base 2: mod_base = OTHER; note = 2'-fluoroadenosine
  modified_base 2^3: mod_base = OTHER; note = phosphorothioate linkage
  modified_base 3: mod_base = OTHER; note = 2'-O-methyladenosine
  modified_base 3^4: mod_base = OTHER; note = phosphorothioate linkage
  modified_base 4: mod_base = OTHER; note = 2'-fluoroguanosine
  modified_base 5: mod_base = cm
  modified_base 6: mod_base = OTHER; note = 2'-fluorocytidine
  modified_base 7: mod_base = OTHER; note = 2'-O-methyladenosine
  modified_base 8: mod_base = OTHER; note = 2'-fluoroadenosine
  modified_base 9: mod_base = cm
  modified_base 10: mod_base = OTHER; note = 2'-fluoroadenosine
  modified_base 11: mod_base = cm
  modified_base 12: mod_base = OTHER; note = 2'-fluorouridine
  modified_base 13: mod_base = gm
  modified_base 14: mod_base = OTHER; note = 2'-fluorocytidine
  modified_base 15: mod_base = OTHER; note = 2'-O-methyladenosine
  modified_base 16: mod_base = OTHER; note = 2'-fluoroguanosine
  modified_base 17: mod_base = gm
  modified_base 18: mod_base = OTHER; note = 2'-fluorouridine
  modified_base 19: mod_base = gm
  modified_base 20: mod_base = OTHER; note = 2'-fluoroadenosine
  modified_base 20^21: mod_base = OTHER; note = phosphorothioate linkage
  modified_base 21: mod_base = cm
  source 1..21: mol_type = other RNA
taagccaacactgcaggtgac

SEQ ID NO: 1109 - RNA, 21 nt, synthetic construct
  modified_base 1: mod_base = um
  modified_base 1^2: mod_base = OTHER; note = phosphorothioate linkage
  modified_base 2: mod_base = OTHER; note = 2'-fluorouridine
  modified_base 2^3: mod_base = OTHER; note = phosphorothioate linkage
  modified_base 3: mod_base = gm
  modified_base 3^4: mod_base = OTHER; note = phosphorothioate linkage
  modified_base 4: mod_base = OTHER; note = 2'-fluorouridine
  modified_base 5: mod_base = OTHER; note = 2'-O-methyladenosine
  modified_base 6: mod_base = OTHER; note = 2'-fluoroadenosine
  modified_base 7: mod_base = cm
  modified_base 8: mod_base = OTHER; note = 2'-fluoroadenosine
  modified_base 9: mod_base = gm
  modified_base 10: mod_base = OTHER; note = 2'-fluoroguanosine
  modified_base 11: mod_base = um
  modified_base 12: mod_base = OTHER; note = 2'-fluorocytidine
  modified_base 13: mod_base = OTHER; note = 2'-O-methyladenosine
  modified_base 14: mod_base = OTHER; note = 2'-fluorouridine
  modified_base 15: mod_base = gm
  modified_base 16: mod_base = OTHER; note = 2'-fluorouridine
  modified_base 17: mod_base = cm
  modified_base 18: mod_base = OTHER; note = 2'-fluorocytidine
  modified_base 19: mod_base = OTHER; note = 2'-O-methyladenosine
  modified_base 20: mod_base = OTHER; note = 2'-fluoroguanosine
  modified_base 20^21: mod_base = OTHER; note = phosphorothioate linkage
  modified_base 21: mod_base = cm
  source 1..21: mol_type = other RNA
ttgtaacaggtcatgtccagc

SEQ ID NO: 1110 - RNA, 21 nt, synthetic construct
  modified_base 1: mod_base = um
  modified_base 1^2: mod_base = OTHER; note = phosphorothioate linkage
  modified_base 2: mod_base = OTHER; note = 2'-fluorocytidine
  modified_base 2^3: mod_base = OTHER; note = phosphorothioate linkage
  modified_base 3: mod_base = gm
  modified_base 3^4: mod_base = OTHER; note = phosphorothioate linkage
  modified_base 4: mod_base = OTHER; note = 2'-fluorouridine
  modified_base 5: mod_base = um
  modified_base 6: mod_base = OTHER; note = 2'-fluoroguanosine
  modified_base 7: mod_base = OTHER; note = 2'-O-methyladenosine
  modified_base 8: mod_base = OTHER; note = 2'-fluoroadenosine
  modified_base 9: mod_base = gm
  modified_base 10: mod_base = OTHER; note = 2'-fluorocytidine
  modified_base 11: mod_base = um
  modified_base 12: mod_base = OTHER; note = 2'-fluoroguanosine
  modified_base 13: mod_base = um
  modified_base 14: mod_base = OTHER; note = 2'-fluoroadenosine
  modified_base 15: mod_base = gm
  modified_base 16: mod_base = OTHER; note = 2'-fluorocytidine
  modified_base 17: mod_base = um
  modified_base 18: mod_base = OTHER; note = 2'-fluorocytidine
  modified_base 19: mod_base = um
  modified_base 20: mod_base = OTHER; note = 2'-fluoroguanosine
  modified_base 20^21: mod_base = OTHER; note = phosphorothioate linkage
  modified_base 21: mod_base = cm
  source 1..21: mol_type = other RNA
tcgttgaagctgtagctctgc

SEQ ID NO: 1111 - RNA, 21 nt, synthetic construct
  modified_base 1: mod_base = um
  modified_base 1^2: mod_base = OTHER; note = phosphorothioate linkage
  modified_base 2: mod_base = OTHER; note = 2'-fluoroadenosine
  modified_base 2^3: mod_base = OTHER; note = phosphorothioate linkage
  modified_base 3: mod_base = cm
  modified_base 3^4: mod_base = OTHER; note = phosphorothioate linkage
  modified_base 4: mod_base = OTHER; note = 2'-fluorocytidine
  modified_base 5: mod_base = OTHER; note = 2'-O-methyladenosine
  modified_base 6: mod_base = OTHER; note = 2'-fluoroguanosine
  modified_base 7: mod_base = OTHER; note = 2',3'-seco-uridine
  modified_base 8: mod_base = OTHER; note = 2'-fluoroguanosine
  modified_base 9: mod_base = cm
  modified_base 10: mod_base = OTHER; note = 2'-fluorouridine
  modified_base 11: mod_base = gm
  modified_base 12: mod_base = OTHER; note = 2'-fluoroadenosine
  modified_base 13: mod_base = gm
  modified_base 14: mod_base = OTHER; note = 2'-fluorocytidine
  modified_base 15: mod_base = OTHER; note = 2'-O-methyladenosine
  modified_base 16: mod_base = OTHER; note = 2'-fluorouridine
  modified_base 17: mod_base = OTHER; note = 2'-O-methyladenosine
  modified_base 18: mod_base = OTHER; note = 2'-fluorocytidine
  modified_base 19: mod_base = um
  modified_base 20: mod_base = OTHER; note = 2'-fluorouridine
  modified_base 20^21: mod_base = OTHER; note = phosphorothioate linkage
  modified_base 21: mod_base = cm
  source 1..21: mol_type = other RNA
taccagtgctgagcatacttc

SEQ ID NO: 1112 - RNA, 21 nt, synthetic construct
  modified_base 1: mod_base = OTHER; note = 5'-cyclopropyl phosphonate-2'-O-methyluridine
  modified_base 1^2: mod_base = OTHER; note = phosphorothioate linkage
  modified_base 2: mod_base = OTHER; note = 2'-fluoroguanosine
  modified_base 2^3: mod_base = OTHER; note = phosphorothioate linkage
  modified_base 3: mod_base = gm
  modified_base 3^4: mod_base = OTHER; note = phosphorothioate linkage
  modified_base 4: mod_base = OTHER; note = 2'-fluoroadenosine
  modified_base 5: mod_base = um
  modified_base 6: mod_base = OTHER; note = 2'-fluorocytidine
  modified_base 7: mod_base = um
  modified_base 8: mod_base = OTHER; note = 2'-fluorocytidine
  modified_base 9: mod_base = OTHER; note = 2'-O-methyladenosine
  modified_base 10: mod_base = OTHER; note = 2'-fluorouridine
  modified_base 11: mod_base = OTHER; note = 2'-O-methyladenosine
  modified_base 12: mod_base = OTHER; note = 2'-fluoroguanosine
  modified_base 13: mod_base = um
  modified_base 14: mod_base = OTHER; note = 2'-fluorouridine
  modified_base 15: mod_base = gm
  modified_base 16: mod_base = OTHER; note = 2'-fluorouridine
  modified_base 17: mod_base = OTHER; note = 2'-O-methyladenosine
  modified_base 18: mod_base = OTHER; note = 2'-fluoroguanosine
  modified_base 19: mod_base = cm
  modified_base 20: mod_base = OTHER; note = 2'-fluoroadenosine
  modified_base 20^21: mod_base = OTHER; note = phosphorothioate linkage
  modified_base 21: mod_base = gm
  source 1..21: mol_type = other RNA
tggatctcatagttgtagcag

SEQ ID NO: 1113 - RNA, 21 nt, synthetic construct
  modified_base 1: mod_base = OTHER; note = 5'-cyclopropyl phosphonate-2'-O-methyluridine
  modified_base 1^2: mod_base = OTHER; note = phosphorothioate linkage
  modified_base 2: mod_base = OTHER; note = 2'-fluoroguanosine
  modified_base 2^3: mod_base = OTHER; note = phosphorothioate linkage
  modified_base 3: mod_base = gm
  modified_base 3^4: mod_base = OTHER; note = phosphorothioate linkage
  modified_base 4: mod_base = OTHER; note = 2'-fluoroadenosine
  modified_base 5: mod_base = um
  modified_base 6: mod_base = OTHER; note = 2'-fluorocytidine
  modified_base 7: mod_base = OTHER; note = 2',3'-seco-uridine
  modified_base 8: mod_base = OTHER; note = 2'-fluorocytidine
  modified_base 9: mod_base = OTHER; note = 2'-O-methyladenosine
  modified_base 10: mod_base = OTHER; note = 2'-fluorouridine
  modified_base 11: mod_base = OTHER; note = 2'-O-methyladenosine
  modified_base 12: mod_base = OTHER; note = 2'-fluoroguanosine
  modified_base 13: mod_base = um
  modified_base 14: mod_base = OTHER; note = 2'-fluorouridine
  modified_base 15: mod_base = gm
  modified_base 16: mod_base = OTHER; note = 2'-fluorouridine
  modified_base 17: mod_base = OTHER; note = 2'-O-methyladenosine
  modified_base 18: mod_base = OTHER; note = 2'-fluoroguanosine
  modified_base 19: mod_base = cm
  modified_base 20: mod_base = OTHER; note = 2'-fluoroadenosine
  modified_base 20^21: mod_base = OTHER; note = phosphorothioate linkage
  modified_base 21: mod_base = gm
  source 1..21: mol_type = other RNA
tggatctcatagttgtagcag

SEQ ID NO: 1114 - RNA, 21 nt, synthetic construct
  modified_base 1: mod_base = OTHER; note = 5'-cyclopropyl phosphonate-2'-O-methyluridine
  modified_base 1^2: mod_base = OTHER; note = phosphorothioate linkage
  modified_base 2: mod_base = OTHER; note = 2'-fluoroguanosine
  modified_base 2^3: mod_base = OTHER; note = phosphorothioate linkage
  modified_base 3: mod_base = um
  modified_base 3^4: mod_base = OTHER; note = phosphorothioate linkage
  modified_base 4: mod_base = OTHER; note = 2'-fluorocytidine
  modified_base 5: mod_base = OTHER; note = 2'-O-methyladenosine
  modified_base 6: mod_base = OTHER; note = 2'-fluoroadenosine
  modified_base 7: mod_base = OTHER; note = 2'-O-methyladenosine
  modified_base 8: mod_base = OTHER; note = 2'-fluorocytidine
  modified_base 9: mod_base = cm
  modified_base 10: mod_base = OTHER; note = 2'-fluoroadenosine
  modified_base 11: mod_base = cm
  modified_base 12: mod_base = OTHER; note = 2'-fluorouridine
  modified_base 13: mod_base = um
  modified_base 14: mod_base = OTHER; note = 2'-fluoroguanosine
  modified_base 15: mod_base = gm
  modified_base 16: mod_base = OTHER; note = 2'-fluorouridine
  modified_base 17: mod_base = cm
  modified_base 18: mod_base = OTHER; note = 2'-fluorocytidine
  modified_base 19: mod_base = OTHER; note = 2'-O-methyladenosine
  modified_base 20: mod_base = OTHER; note = 2'-fluoroguanosine
  modified_base 20^21: mod_base = OTHER; note = phosphorothioate linkage
  modified_base 21: mod_base = gm
  source 1..21: mol_type = other RNA
tgtcaaaccacttggtccagg

SEQ ID NO: 1115 - RNA, 21 nt, synthetic construct
  modified_base 1: mod_base = OTHER; note = 5'-cyclopropyl phosphonate-2'-O-methyluridine
  modified_base 1^2: mod_base = OTHER; note = phosphorothioate linkage
  modified_base 2: mod_base = OTHER; note = 2'-fluorouridine
  modified_base 2^3: mod_base = OTHER; note = phosphorothioate linkage
  modified_base 3: mod_base = gm
  modified_base 3^4: mod_base = OTHER; note = phosphorothioate linkage
  modified_base 4: mod_base = OTHER; note = 2'-fluorouridine
  modified_base 5: mod_base = um
  modified_base 6: mod_base = OTHER; note = 2'-fluoroguanosine
  modified_base 7: mod_base = um
  modified_base 8: mod_base = OTHER; note = 2'-fluorouridine
  modified_base 9: mod_base = gm
  modified_base 10: mod_base = OTHER; note = 2'-fluoroadenosine
  modified_base 11: mod_base = OTHER; note = 2'-O-methyladenosine
  modified_base 12: mod_base = OTHER; note = 2'-fluoroguanosine
  modified_base 13: mod_base = OTHER; note = 2'-O-methyladenosine
  modified_base 14: mod_base = OTHER; note = 2'-fluorouridine
  modified_base 15: mod_base = gm
  modified_base 16: mod_base = OTHER; note = 2'-fluoroadenosine
  modified_base 17: mod_base = um
  modified_base 18: mod_base = OTHER; note = 2'-fluorocytidine
  modified_base 19: mod_base = um
  modified_base 20: mod_base = OTHER; note = 2'-fluorocytidine
  modified_base 20^21: mod_base = OTHER; note = phosphorothioate linkage
  modified_base 21: mod_base = gm
  source 1..21: mol_type = other RNA
ttgttgttgaagatgatctcg

SEQ ID NO: 1116 - RNA, 21 nt, synthetic construct
  modified_base 1: mod_base = OTHER; note = 5'-cyclopropyl phosphonate-2'-O-methyluridine
  modified_base 1^2: mod_base = OTHER; note = phosphorothioate linkage
  modified_base 2: mod_base = OTHER; note = 2'-fluorouridine
  modified_base 2^3: mod_base = OTHER; note = phosphorothioate linkage
  modified_base 3: mod_base = gm
  modified_base 3^4: mod_base = OTHER; note = phosphorothioate linkage
  modified_base 4: mod_base = OTHER; note = 2'-fluorouridine
  modified_base 5: mod_base = um
  modified_base 6: mod_base = gm
  modified_base 7: mod_base = um
  modified_base 8: mod_base = um
  modified_base 9: mod_base = gm
  modified_base 10: mod_base = OTHER; note = 2'-O-methyladenosine
  modified_base 11: mod_base = OTHER; note = 2'-O-methyladenosine
  modified_base 12: mod_base = OTHER; note = 2'-fluoroguanosine
  modified_base 13: mod_base = OTHER; note = 2'-O-methyladenosine
  modified_base 14: mod_base = OTHER; note = 2'-fluorouridine
  modified_base 15: mod_base = gm
  modified_base 16: mod_base = OTHER; note = 2'-fluoroadenosine
  modified_base 17: mod_base = um
  modified_base 18: mod_base = cm
  modified_base 19: mod_base = um
  modified_base 20: mod_base = cm
  modified_base 20^21: mod_base = OTHER; note = phosphorothioate linkage
  modified_base 21: mod_base = gm
  source 1..21: mol_type = other RNA
ttgttgttgaagatgatctcg

SEQ ID NO: 1117 - RNA, 21 nt, synthetic construct
  modified_base 1: mod_base = um
  modified_base 1^2: mod_base = OTHER; note = phosphorothioate linkage
  modified_base 2: mod_base = OTHER; note = 2'-fluoroadenosine
  modified_base 2^3: mod_base = OTHER; note = phosphorothioate linkage
  modified_base 3: mod_base = gm
  modified_base 3^4: mod_base = OTHER; note = phosphorothioate linkage
  modified_base 4: mod_base = OTHER; note = 2'-fluorouridine
  modified_base 5: mod_base = OTHER; note = 2'-O-methyladenosine
  modified_base 6: mod_base = OTHER; note = 2'-fluorocytidine
  modified_base 7: mod_base = OTHER; note = 2'-O-methyladenosine
  modified_base 8: mod_base = OTHER; note = 2'-fluoroguanosine
  modified_base 9: mod_base = um
  modified_base 10: mod_base = OTHER; note = 2'-fluoroguanosine
  modified_base 11: mod_base = OTHER; note = 2'-O-methyladenosine
  modified_base 12: mod_base = OTHER; note = 2'-fluoroadenosine
  modified_base 13: mod_base = gm
  modified_base 14: mod_base = OTHER; note = 2'-fluoroguanosine
  modified_base 15: mod_base = cm
  modified_base 16: mod_base = OTHER; note = 2'-fluoroadenosine
  modified_base 17: mod_base = cm
  modified_base 18: mod_base = OTHER; note = 2'-fluorouridine
  modified_base 19: mod_base = gm
  modified_base 20: mod_base = OTHER; note = 2'-fluorocytidine
  modified_base 20^21: mod_base = OTHER; note = phosphorothioate linkage
  modified_base 21: mod_base = um
  source 1..21: mol_type = other RNA
tagtacagtgaaggcactgct

SEQ ID NO: 1118 - RNA, 21 nt, synthetic construct
  modified_base 1: mod_base = um
  modified_base 1^2: mod_base = OTHER; note = phosphorothioate linkage
  modified_base 2: mod_base = OTHER; note = 2'-fluorouridine
  modified_base 2^3: mod_base = OTHER; note = phosphorothioate linkage
  modified_base 3: mod_base = cm
  modified_base 3^4: mod_base = OTHER; note = phosphorothioate linkage
  modified_base 4: mod_base = OTHER; note = 2'-fluoroguanosine
  modified_base 5: mod_base = OTHER; note = 2'-O-methyladenosine
  modified_base 6: mod_base = OTHER; note = 2'-fluoroadenosine
  modified_base 7: mod_base = gm
  modified_base 8: mod_base = OTHER; note = 2'-fluorocytidine
  modified_base 9: mod_base = um
  modified_base 10: mod_base = OTHER; note = 2'-fluoroguanosine
  modified_base 11: mod_base = um
  modified_base 12: mod_base = OTHER; note = 2'-fluorouridine
  modified_base 13: mod_base = cm
  modified_base 14: mod_base = OTHER; note = 2'-fluorocytidine
  modified_base 15: mod_base = um
  modified_base 16: mod_base = OTHER; note = 2'-fluoroguanosine
  modified_base 17: mod_base = OTHER; note = 2'-O-methyladenosine
  modified_base 18: mod_base = OTHER; note = 2'-fluorouridine
  modified_base 19: mod_base = gm
  modified_base 20: mod_base = OTHER; note = 2'-fluorouridine
  modified_base 20^21: mod_base = OTHER; note = phosphorothioate linkage
  modified_base 21: mod_base = cm
  source 1..21: mol_type = other RNA
ttcgaagctgttcctgatgtc

SEQ ID NO: 1119 - RNA, 21 nt, synthetic construct
  modified_base 1: mod_base = um
  modified_base 1^2: mod_base = OTHER; note = phosphorothioate linkage
  modified_base 2: mod_base = OTHER; note = 2'-fluorocytidine
  modified_base 2^3: mod_base = OTHER; note = phosphorothioate linkage
  modified_base 3: mod_base = um
  modified_base 3^4: mod_base = OTHER; note = phosphorothioate linkage
  modified_base 4: mod_base = OTHER; note = 2'-fluorouridine
  modified_base 5: mod_base = gm
  modified_base 6: mod_base = OTHER; note = 2'-fluorouridine
  modified_base 7: mod_base = um
  modified_base 8: mod_base = OTHER; note = 2'-fluorocytidine
  modified_base 9: mod_base = OTHER; note = 2'-O-methyladenosine
  modified_base 10: mod_base = OTHER; note = 2'-fluoroguanosine
  modified_base 11: mod_base = gm
  modified_base 12: mod_base = OTHER; note = 2'-fluorocytidine
  modified_base 13: mod_base = OTHER; note = 2'-O-methyladenosine
  modified_base 14: mod_base = OTHER; note = 2'-fluoroadenosine
  modified_base 15: mod_base = OTHER; note = 2'-O-methyladenosine
  modified_base 16: mod_base = OTHER; note = 2'-fluorouridine
  modified_base 17: mod_base = cm
  modified_base 18: mod_base = OTHER; note = 2'-fluoroadenosine
  modified_base 19: mod_base = gm
  modified_base 20: mod_base = OTHER; note = 2'-fluorocytidine
  modified_base 20^21: mod_base = OTHER; note = phosphorothioate linkage
  modified_base 21: mod_base = cm
  source 1..21: mol_type = other RNA
tcttgttcaggcaaatcagcc

SEQ ID NO: 1120 - RNA, 21 nt, synthetic construct
  modified_base 1: mod_base = um
  modified_base 1^2: mod_base = OTHER; note = phosphorothioate linkage
  modified_base 2: mod_base = OTHER; note = 2'-fluorocytidine
  modified_base 2^3: mod_base = OTHER; note = phosphorothioate linkage
  modified_base 3: mod_base = OTHER; note = 2'-O-methyladenosine
  modified_base 3^4: mod_base = OTHER; note = phosphorothioate linkage
  modified_base 4: mod_base = OTHER; note = 2'-fluorocytidine
  modified_base 5: mod_base = cm
  modified_base 6: mod_base = OTHER; note = 2'-fluoroadenosine
  modified_base 7: mod_base = OTHER; note = 2'-O-methyladenosine
  modified_base 8: mod_base = OTHER; note = 2'-fluoroadenosine
  modified_base 9: mod_base = gm
  modified_base 10: mod_base = OTHER; note = 2'-fluorouridine
  modified_base 11: mod_base = gm
  modified_base 12: mod_base = OTHER; note = 2'-fluoroguanosine
  modified_base 13: mod_base = um
  modified_base 14: mod_base = OTHER; note = 2'-fluorouridine
  modified_base 15: mod_base = gm
  modified_base 16: mod_base = OTHER; note = 2'-fluorouridine
  modified_base 17: mod_base = cm
  modified_base 18: mod_base = OTHER; note = 2'-fluorocytidine
  modified_base 19: mod_base = um
  modified_base 20: mod_base = OTHER; note = 2'-fluoroguanosine
  modified_base 20^21: mod_base = OTHER; note = phosphorothioate linkage
  modified_base 21: mod_base = gm
  source 1..21: mol_type = other RNA
tcaccaaagtggttgtcctgg

SEQ ID NO: 1121 - RNA, 21 nt, synthetic construct
  modified_base 1: mod_base = um
  modified_base 1^2: mod_base = OTHER; note = phosphorothioate linkage
  modified_base 2: mod_base = OTHER; note = 2'-fluoroadenosine
  modified_base 2^3: mod_base = OTHER; note = phosphorothioate linkage
  modified_base 3: mod_base = gm
  modified_base 3^4: mod_base = OTHER; note = phosphorothioate linkage
  modified_base 4: mod_base = OTHER; note = 2'-fluorocytidine
  modified_base 5: mod_base = OTHER; note = 2'-O-methyladenosine
  modified_base 6: mod_base = OTHER; note = 2'-fluoroguanosine
  modified_base 7: mod_base = OTHER; note = 2'-O-methyladenosine
  modified_base 8: mod_base = OTHER; note = 2'-fluoroguanosine
  modified_base 9: mod_base = gm
  modified_base 10: mod_base = OTHER; note = 2'-fluorouridine
  modified_base 11: mod_base = um
  modified_base 12: mod_base = OTHER; note = 2'-fluoroguanosine
  modified_base 13: mod_base = um
  modified_base 14: mod_base = OTHER; note = 2'-fluorouridine
  modified_base 15: mod_base = cm
  modified_base 16: mod_base = OTHER; note = 2'-fluorouridine
  modified_base 17: mod_base = gm
  modified_base 18: mod_base = OTHER; note = 2'-fluoroguanosine
  modified_base 19: mod_base = um
  modified_base 20: mod_base = OTHER; note = 2'-fluorouridine
  modified_base 20^21: mod_base = OTHER; note = phosphorothioate linkage
  modified_base 21: mod_base = gm
  source 1..21: mol_type = other RNA
tagcagaggttgttctggttg

SEQ ID NO: 1122 - RNA, 21 nt, synthetic construct
  modified_base 1: mod_base = um
  modified_base 1^2: mod_base = OTHER; note = phosphorothioate linkage
  modified_base 2: mod_base = OTHER; note = 2'-fluoroadenosine
  modified_base 2^3: mod_base = OTHER; note = phosphorothioate linkage
  modified_base 3: mod_base = gm
  modified_base 3^4: mod_base = OTHER; note = phosphorothioate linkage
  modified_base 4: mod_base = OTHER; note = 2'-fluoroadenosine
  modified_base 5: mod_base = um
  modified_base 6: mod_base = OTHER; note = 2'-fluorouridine
  modified_base 7: mod_base = gm
  modified_base 8: mod_base = OTHER; note = 2'-fluorouridine
  modified_base 9: mod_base = gm
  modified_base 10: mod_base = OTHER; note = 2'-fluorocytidine
  modified_base 11: mod_base = um
  modified_base 12: mod_base = OTHER; note = 2'-fluoroguanosine
  modified_base 13: mod_base = gm
  modified_base 14: mod_base = OTHER; note = 2'-fluorouridine
  modified_base 15: mod_base = um
  modified_base 16: mod_base = OTHER; note = 2'-fluoroguanosine
  modified_base 17: mod_base = um
  modified_base 18: mod_base = OTHER; note = 2'-fluoroadenosine
  modified_base 19: mod_base = gm
  modified_base 20: mod_base = OTHER; note = 2'-fluorocytidine
  modified_base 20^21: mod_base = OTHER; note = phosphorothioate linkage
  modified_base 21: mod_base = gm
  source 1..21: mol_type = other RNA
tagattgtgctggttgtagcg

SEQ ID NO: 1123 - RNA, 21 nt, synthetic construct
  modified_base 1: mod_base = um
  modified_base 1^2: mod_base = OTHER; note = phosphorothioate linkage
  modified_base 2: mod_base = OTHER; note = 2'-fluoroadenosine
  modified_base 2^3: mod_base = OTHER; note = phosphorothioate linkage
  modified_base 3: mod_base = gm
  modified_base 3^4: mod_base = OTHER; note = phosphorothioate linkage
  modified_base 4: mod_base = OTHER; note = 2'-fluoroadenosine
  modified_base 5: mod_base = OTHER; note = 2'-O-methyladenosine
  modified_base 6: mod_base = OTHER; note = 2'-fluoroguanosine
  modified_base 7: mod_base = um
  modified_base 8: mod_base = OTHER; note = 2'-fluorouridine
  modified_base 9: mod_base = gm
  modified_base 10: mod_base = OTHER; note = 2'-fluorouridine
  modified_base 11: mod_base = gm
  modified_base 12: mod_base = OTHER; note = 2'-fluorocytidine
  modified_base 13: mod_base = um
  modified_base 14: mod_base = OTHER; note = 2'-fluoroguanosine
  modified_base 15: mod_base = gm
  modified_base 16: mod_base = OTHER; note = 2'-fluorouridine
  modified_base 17: mod_base = um
  modified_base 18: mod_base = OTHER; note = 2'-fluoroguanosine
  modified_base 19: mod_base = um
  modified_base 20: mod_base = OTHER; note = 2'-fluoroguanosine
  modified_base 20^21: mod_base = OTHER; note = phosphorothioate linkage
  modified_base 21: mod_base = gm
  source 1..21: mol_type = other RNA
tagaagttgtgctggttgtgg

SEQ ID NO: 1124 - RNA, 21 nt, synthetic construct
  modified_base 1: mod_base = um
  modified_base 1^2: mod_base = OTHER; note = phosphorothioate linkage
  modified_base 2: mod_base = OTHER; note = 2'-fluorouridine
  modified_base 2^3: mod_base = OTHER; note = phosphorothioate linkage
  modified_base 3: mod_base = um
  modified_base 3^4: mod_base = OTHER; note = phosphorothioate linkage
  modified_base 4: mod_base = OTHER; note = 2'-fluoroguanosine
  modified_base 5: mod_base = um
  modified_base 6: mod_base = OTHER; note = 2'-fluorocytidine
  modified_base 7: mod_base = OTHER; note = 2'-O-methyladenosine
  modified_base 8: mod_base = OTHER; note = 2'-fluorocytidine
  modified_base 9: mod_base = cm
  modified_base 10: mod_base = OTHER; note = 2'-fluoroadenosine
  modified_base 11: mod_base = OTHER; note = 2'-O-methyladenosine
  modified_base 12: mod_base = OTHER; note = 2'-fluoroadenosine
  modified_base 13: mod_base = gm
  modified_base 14: mod_base = OTHER; note = 2'-fluorouridine
  modified_base 15: mod_base = gm
  modified_base 16: mod_base = OTHER; note = 2'-fluoroguanosine
  modified_base 17: mod_base = um
  modified_base 18: mod_base = OTHER; note = 2'-fluorouridine
  modified_base 19: mod_base = gm
  modified_base 20: mod_base = OTHER; note = 2'-fluorouridine
  modified_base 20^21: mod_base = OTHER; note = phosphorothioate linkage
  modified_base 21: mod_base = cm
  source 1..21: mol_type = other RNA
tttgtcaccaaagtggttgtc

SEQ ID NO: 1125 - RNA, 21 nt, synthetic construct
  modified_base 1: mod_base = um
  modified_base 1^2: mod_base = OTHER; note = phosphorothioate linkage
  modified_base 2: mod_base = OTHER; note = 2'-fluoroadenosine
  modified_base 2^3: mod_base = OTHER; note = phosphorothioate linkage
  modified_base 3: mod_base = gm
  modified_base 3^4: mod_base = OTHER; note = phosphorothioate linkage
  modified_base 4: mod_base = OTHER; note = 2'-fluoroadenosine
  modified_base 5: mod_base = gm
  modified_base 6: mod_base = OTHER; note = 2'-fluoroguanosine
  modified_base 7: mod_base = um
  modified_base 8: mod_base = OTHER; note = 2'-fluorouridine
  modified_base 9: mod_base = gm
  modified_base 10: mod_base = OTHER; note = 2'-fluorouridine
  modified_base 11: mod_base = gm
  modified_base 12: mod_base = OTHER; note = 2'-fluorouridine
  modified_base 13: mod_base = um
  modified_base 14: mod_base = OTHER; note = 2'-fluoroguanosine
  modified_base 15: mod_base = gm
  modified_base 16: mod_base = OTHER; note = 2'-fluorouridine
  modified_base 17: mod_base = um
  modified_base 18: mod_base = OTHER; note = 2'-fluoroguanosine
  modified_base 19: mod_base = um
  modified_base 20: mod_base = OTHER; note = 2'-fluoroadenosine
  modified_base 20^21: mod_base = OTHER; note = phosphorothioate linkage
  modified_base 21: mod_base = gm
  source 1..21: mol_type = other RNA
tagaggttgtgttggttgtag

SEQ ID NO: 1126 - RNA, 21 nt, synthetic construct
  modified_base 1: mod_base = um
  modified_base 1^2: mod_base = OTHER; note = phosphorothioate linkage
  modified_base 2: mod_base = OTHER; note = 2'-fluorocytidine
  modified_base 2^3: mod_base = OTHER; note = phosphorothioate linkage
  modified_base 3: mod_base = um
  modified_base 3^4: mod_base = OTHER; note = phosphorothioate linkage
  modified_base 4: mod_base = OTHER; note = 2'-fluoroadenosine
  modified_base 5: mod_base = gm
  modified_base 6: mod_base = OTHER; note = 2'-fluorouridine
  modified_base 7: mod_base = um
  modified_base 8: mod_base = OTHER; note = 2'-fluoroguanosine
  modified_base 9: mod_base = um
  modified_base 10: mod_base = OTHER; note = 2'-fluoroadenosine
  modified_base 11: mod_base = gm
  modified_base 12: mod_base = OTHER; note = 2'-fluoroguanosine
  modified_base 13: mod_base = OTHER; note = 2'-O-methyladenosine
  modified_base 14: mod_base = OTHER; note = 2'-fluoroguanosine
  modified_base 15: mod_base = cm
  modified_base 16: mod_base = OTHER; note = 2'-fluoroadenosine
  modified_base 17: mod_base = gm
  modified_base 18: mod_base = OTHER; note = 2'-fluoroadenosine
  modified_base 19: mod_base = gm
  modified_base 20: mod_base = OTHER; note = 2'-fluoroguanosine
  modified_base 20^21: mod_base = OTHER; note = phosphorothioate linkage
  modified_base 21: mod_base = um
  source 1..21: mol_type = other RNA
tctagttgtaggagcagaggt

SEQ ID NO: 1127 - RNA, 21 nt, synthetic construct
  modified_base 1: mod_base = OTHER; note = 5'-cyclopropyl phosphonate-2'-O-methyluridine
  modified_base 1^2: mod_base = OTHER; note = phosphorothioate linkage
  modified_base 2: mod_base = OTHER; note = 2'-fluorouridine
  modified_base 2^3: mod_base = OTHER; note = phosphorothioate linkage
  modified_base 3: mod_base = gm
  modified_base 3^4: mod_base = OTHER; note = phosphorothioate linkage
  modified_base 4: mod_base = OTHER; note = 2'-fluorouridine
  modified_base 5: mod_base = OTHER; note = 2'-O-methyladenosine
  modified_base 6: mod_base = OTHER; note = 2'-fluoroguanosine
  modified_base 7: mod_base = um
  modified_base 8: mod_base = OTHER; note = 2'-fluoroadenosine
  modified_base 9: mod_base = gm
  modified_base 10: mod_base = OTHER; note = 2'-fluorouridine
  modified_base 11: mod_base = cm
  modified_base 12: mod_base = OTHER; note = 2'-fluoroguanosine
  modified_base 13: mod_base = cm
  modified_base 14: mod_base = OTHER; note = 2'-fluoroadenosine
  modified_base 15: mod_base = gm
  modified_base 16: mod_base = OTHER; note = 2'-fluoroadenosine
  modified_base 17: mod_base = OTHER; note = 2'-O-methyladenosine
  modified_base 18: mod_base = OTHER; note = 2'-fluorocytidine
  modified_base 19: mod_base = OTHER; note = 2'-O-methyladenosine
  modified_base 20: mod_base = OTHER; note = 2'-fluoroguanosine
  modified_base 20^21: mod_base = OTHER; note = phosphorothioate linkage
  modified_base 21: mod_base = cm
  source 1..21: mol_type = other RNA
ttgtagtagtcgcagaacagc

SEQ ID NO: 1128 - RNA, 21 nt, synthetic construct
  modified_base 1: mod_base = um
  modified_base 1^2: mod_base = OTHER; note = phosphorothioate linkage
  modified_base 2: mod_base = OTHER; note = 2'-fluorouridine
  modified_base 2^3: mod_base = OTHER; note = phosphorothioate linkage
  modified_base 3: mod_base = gm
  modified_base 3^4: mod_base = OTHER; note = phosphorothioate linkage
  modified_base 4: mod_base = OTHER; note = 2'-fluorouridine
  modified_base 5: mod_base = OTHER; note = 2'-O-methyladenosine
  modified_base 6: mod_base = OTHER; note = 2'-fluoroguanosine
  modified_base 7: mod_base = um
  modified_base 8: mod_base = OTHER; note = 2'-fluoroadenosine
  modified_base 9: mod_base = gm
  modified_base 10: mod_base = OTHER; note = 2'-fluorouridine
  modified_base 11: mod_base = cm
  modified_base 12: mod_base = OTHER; note = 2'-fluoroadenosine
  modified_base 13: mod_base = cm
  modified_base 14: mod_base = OTHER; note = 2'-fluoroadenosine
  modified_base 15: mod_base = gm
  modified_base 16: mod_base = OTHER; note = 2'-fluoroadenosine
  modified_base 17: mod_base = OTHER; note = 2'-O-methyladenosine
  modified_base 18: mod_base = OTHER; note = 2'-fluorocytidine
  modified_base 19: mod_base = OTHER; note = 2'-O-methyladenosine
  modified_base 20: mod_base = OTHER; note = 2'-fluoroguanosine
  modified_base 20^21: mod_base = OTHER; note = phosphorothioate linkage
  modified_base 21: mod_base = cm
  source 1..21: mol_type = other RNA
ttgtagtagtcacagaacagc

SEQ ID NO: 1129 - RNA, 21 nt, synthetic construct
  modified_base 1: mod_base = OTHER; note = 5'-cyclopropyl phosphonate-2'-O-methyluridine
  modified_base 1^2: mod_base = OTHER; note = phosphorothioate linkage
  modified_base 2: mod_base = OTHER; note = 2'-fluorouridine
  modified_base 2^3: mod_base = OTHER; note = phosphorothioate linkage
  modified_base 3: mod_base = gm
  modified_base 3^4: mod_base = OTHER; note = phosphorothioate linkage
  modified_base 4: mod_base = OTHER; note = 2'-fluorouridine
  modified_base 5: mod_base = OTHER; note = 2'-O-methyladenosine
  modified_base 6: mod_base = OTHER; note = 2'-fluoroguanosine
  modified_base 7: mod_base = um
  modified_base 8: mod_base = OTHER; note = 2'-fluoroadenosine
  modified_base 9: mod_base = gm
  modified_base 10: mod_base = OTHER; note = 2'-fluorouridine
  modified_base 11: mod_base = cm
  modified_base 12: mod_base = OTHER; note = 2'-fluoroadenosine
  modified_base 13: mod_base = cm
  modified_base 14: mod_base = OTHER; note = 2'-fluoroadenosine
  modified_base 15: mod_base = gm
  modified_base 16: mod_base = OTHER; note = 2'-fluoroadenosine
  modified_base 17: mod_base = OTHER; note = 2'-O-methyladenosine
  modified_base 18: mod_base = OTHER; note = 2'-fluorocytidine
  modified_base 19: mod_base = OTHER; note = 2'-O-methyladenosine
  modified_base 20: mod_base = OTHER; note = 2'-fluoroguanosine
  modified_base 20^21: mod_base = OTHER; note = phosphorothioate linkage
  modified_base 21: mod_base = cm
  source 1..21: mol_type = other RNA
ttgtagtagtcacagaacagc

SEQ ID NO: 1130 - RNA, 21 nt, synthetic construct
  modified_base 1: mod_base = OTHER; note = 5'-cyclopropyl phosphonate-2'-O-methyluridine
  modified_base 1^2: mod_base = OTHER; note = phosphorothioate linkage
  modified_base 2: mod_base = OTHER; note = 2'-fluorouridine
  modified_base 2^3: mod_base = OTHER; note = phosphorothioate linkage
  modified_base 3: mod_base = gm
  modified_base 3^4: mod_base = OTHER; note = phosphorothioate linkage
  modified_base 4: mod_base = um
  modified_base 5: mod_base = OTHER; note = 2'-O-methyladenosine
  modified_base 6: mod_base = gm
  modified_base 7: mod_base = um
  modified_base 8: mod_base = OTHER; note = 2'-O-methyladenosine
  modified_base 9: mod_base = gm
  modified_base 10: mod_base = um
  modified_base 11: mod_base = cm
  modified_base 12: mod_base = OTHER; note = 2'-fluoroadenosine
  modified_base 13: mod_base = cm
  modified_base 14: mod_base = OTHER; note = 2'-fluoroadenosine
  modified_base 15: mod_base = gm
  modified_base 16: mod_base = OTHER; note = 2'-fluoroadenosine
  modified_base 17: mod_base = OTHER; note = 2'-O-methyladenosine
  modified_base 18: mod_base = cm
  modified_base 19: mod_base = OTHER; note = 2'-O-methyladenosine
  modified_base 20: mod_base = gm
  modified_base 20^21: mod_base = OTHER; note = phosphorothioate linkage
  modified_base 21: mod_base = cm
  source 1..21: mol_type = other RNA
ttgtagtagtcacagaacagc

SEQ ID NO: 1131 - RNA, 21 nt, synthetic construct
  modified_base 1: mod_base = OTHER; note = 5'-cyclopropyl phosphonate-2'-O-methyluridine
  modified_base 1^2: mod_base = OTHER; note = phosphorothioate linkage
  modified_base 2: mod_base = OTHER; note = 2'-fluorocytidine
  modified_base 2^3: mod_base = OTHER; note = phosphorothioate linkage
  modified_base 3: mod_base = OTHER; note = 2'-O-methyladenosine
  modified_base 3^4: mod_base = OTHER; note = phosphorothioate linkage
  modified_base 4: mod_base = um
  modified_base 5: mod_base = OTHER; note = 2'-O-methyladenosine
  modified_base 6: mod_base = gm
  modified_base 7: mod_base = um
  modified_base 8: mod_base = um
  modified_base 9: mod_base = gm
  modified_base 10: mod_base = um
  modified_base 11: mod_base = OTHER; note = 2'-O-methyladenosine
  modified_base 12: mod_base = OTHER; note = 2'-fluoroguanosine
  modified_base 13: mod_base = cm
  modified_base 14: mod_base = OTHER; note = 2'-fluoroadenosine
  modified_base 15: mod_base = cm
  modified_base 16: mod_base = OTHER; note = 2'-fluoroadenosine
  modified_base 17: mod_base = um
  modified_base 18: mod_base = gm
  modified_base 19: mod_base = gm
  modified_base 20: mod_base = gm
  modified_base 20^21: mod_base = OTHER; note = phosphorothioate linkage
  modified_base 21: mod_base = um
  source 1..21: mol_type = other RNA
tcatagttgtagcacatgggt

SEQ ID NO: 1132 - RNA, 21 nt, synthetic construct
  modified_base 1: mod_base = OTHER; note = 5'-cyclopropyl phosphonate-2'-O-methyluridine
  modified_base 1^2: mod_base = OTHER; note = phosphorothioate linkage
  modified_base 2: mod_base = OTHER; note = 2'-fluoroguanosine
  modified_base 2^3: mod_base = OTHER; note = phosphorothioate linkage
  modified_base 3: mod_base = um
  modified_base 3^4: mod_base = OTHER; note = phosphorothioate linkage
  modified_base 4: mod_base = OTHER; note = 2'-fluorouridine
  modified_base 5: mod_base = gm
  modified_base 6: mod_base = OTHER; note = 2'-fluorouridine
  modified_base 7: mod_base = um
  modified_base 8: mod_base = OTHER; note = 2'-fluoroguanosine
  modified_base 9: mod_base = OTHER; note = 2'-O-methyladenosine
  modified_base 10: mod_base = OTHER; note = 2'-fluoroadenosine
  modified_base 11: mod_base = gm
  modified_base 12: mod_base = OTHER; note = 2'-fluoroadenosine
  modified_base 13: mod_base = um
  modified_base 14: mod_base = OTHER; note = 2'-fluoroguanosine
  modified_base 15: mod_base = OTHER; note = 2'-O-methyladenosine
  modified_base 16: mod_base = OTHER; note = 2'-fluorouridine
  modified_base 17: mod_base = cm
  modified_base 18: mod_base = OTHER; note = 2'-fluorouridine
  modified_base 19: mod_base = gm
  modified_base 20: mod_base = OTHER; note = 2'-fluoroguanosine
  modified_base 20^21: mod_base = OTHER; note = phosphorothioate linkage
  modified_base 21: mod_base = um
  source 1..21: mol_type = other RNA
tgttgttgaagatgatctggt

SEQ ID NO: 1133 - RNA, 21 nt, synthetic construct
  modified_base 1: mod_base = OTHER; note = 5'-cyclopropyl phosphonate-2'-O-methyluridine
  modified_base 1^2: mod_base = OTHER; note = phosphorothioate linkage
  modified_base 2: mod_base = OTHER; note = 2'-fluoroguanosine
  modified_base 2^3: mod_base = OTHER; note = phosphorothioate linkage
  modified_base 3: mod_base = um
  modified_base 3^4: mod_base = OTHER; note = phosphorothioate linkage
  modified_base 4: mod_base = um
  modified_base 5: mod_base = gm
  modified_base 6: mod_base = um
  modified_base 7: mod_base = um
  modified_base 8: mod_base = gm
  modified_base 9: mod_base = OTHER; note = 2'-O-methyladenosine
  modified_base 10: mod_base = OTHER; note = 2'-O-methyladenosine
  modified_base 11: mod_base = gm
  modified_base 12: mod_base = OTHER; note = 2'-fluoroadenosine
  modified_base 13: mod_base = um
  modified_base 14: mod_base = OTHER; note = 2'-fluoroguanosine
  modified_base 15: mod_base = OTHER; note = 2'-O-methyladenosine
  modified_base 16: mod_base = OTHER; note = 2'-fluorouridine
  modified_base 17: mod_base = cm
  modified_base 18: mod_base = um
  modified_base 19: mod_base = gm
  modified_base 20: mod_base = gm
  modified_base 20^21: mod_base = OTHER; note = phosphorothioate linkage
  modified_base 21: mod_base = um
  source 1..21: mol_type = other RNA
tgttgttgaagatgatctggt

SEQ ID NO: 1134 - RNA, 21 nt, synthetic construct
  modified_base 1: mod_base = OTHER; note = 5'-cyclopropyl phosphonate-2'-O-methyluridine
  modified_base 1^2: mod_base = OTHER; note = phosphorothioate linkage
  modified_base 2: mod_base = OTHER; note = 2'-fluoroguanosine
  modified_base 2^3: mod_base = OTHER; note = phosphorothioate linkage
  modified_base 3: mod_base = um
  modified_base 3^4: mod_base = OTHER; note = phosphorothioate linkage
  modified_base 4: mod_base = OTHER; note = 2'-fluorouridine
  modified_base 5: mod_base = gm
  modified_base 6: mod_base = OTHER; note = 2'-fluoroadenosine
  modified_base 7: mod_base = OTHER; note = 2'-O-methyladenosine
  modified_base 8: mod_base = OTHER; note = 2'-fluoroguanosine
  modified_base 9: mod_base = um
  modified_base 10: mod_base = OTHER; note = 2'-fluorouridine
  modified_base 11: mod_base = OTHER; note = 2'-O-methyladenosine
  modified_base 12: mod_base = OTHER; note = 2'-fluorocytidine
  modified_base 13: mod_base = cm
  modified_base 14: mod_base = OTHER; note = 2'-fluoroadenosine
  modified_base 15: mod_base = cm
  modified_base 16: mod_base = OTHER; note = 2'-fluoroadenosine
  modified_base 17: mod_base = gm
  modified_base 18: mod_base = OTHER; note = 2'-fluoroadenosine
  modified_base 19: mod_base = gm
  modified_base 20: mod_base = OTHER; note = 2'-fluorocytidine
  modified_base 20^21: mod_base = OTHER; note = phosphorothioate linkage
  modified_base 21: mod_base = cm
  source 1..21: mol_type = other RNA
tgttgaagttaccacagagcc

SEQ ID NO: 1135 - RNA, 21 nt, synthetic construct
  modified_base 1: mod_base = OTHER; note = 5'-cyclopropyl phosphonate-2'-O-methyluridine
  modified_base 1^2: mod_base = OTHER; note = phosphorothioate linkage
  modified_base 2: mod_base = OTHER; note = 2'-fluoroadenosine
  modified_base 2^3: mod_base = OTHER; note = phosphorothioate linkage
  modified_base 3: mod_base = cm
  modified_base 3^4: mod_base = OTHER; note = phosphorothioate linkage
  modified_base 4: mod_base = OTHER; note = 2'-fluorouridine
  modified_base 5: mod_base = um
  modified_base 6: mod_base = OTHER; note = 2'-fluorouridine
  modified_base 7: mod_base = um
  modified_base 8: mod_base = OTHER; note = 2'-fluorocytidine
  modified_base 9: mod_base = OTHER; note = 2'-O-methyladenosine
  modified_base 10: mod_base = OTHER; note = 2'-fluorouridine
  modified_base 11: mod_base = um
  modified_base 12: mod_base = OTHER; note = 2'-fluorocytidine
  modified_base 13: mod_base = um
  modified_base 14: mod_base = OTHER; note = 2'-fluorocytidine
  modified_base 15: mod_base = cm
  modified_base 16: mod_base = OTHER; note = 2'-fluoroadenosine
  modified_base 17: mod_base = cm
  modified_base 18: mod_base = OTHER; note = 2'-fluoroguanosine
  modified_base 19: mod_base = cm
  modified_base 20: mod_base = OTHER; note = 2'-fluorouridine
  modified_base 20^21: mod_base = OTHER; note = phosphorothioate linkage
  modified_base 21: mod_base = cm
  source 1..21: mol_type = other RNA
tacttttcattctccacgctc

SEQ ID NO: 1136 - RNA, 21 nt, synthetic construct
  modified_base 1: mod_base = OTHER; note = 5'-cyclopropyl phosphonate-2'-O-methyluridine
  modified_base 1^2: mod_base = OTHER; note = phosphorothioate linkage
  modified_base 2: mod_base = OTHER; note = 2'-fluoroadenosine
  modified_base 2^3: mod_base = OTHER; note = phosphorothioate linkage
  modified_base 3: mod_base = gm
  modified_base 3^4: mod_base = OTHER; note = phosphorothioate linkage
  modified_base 4: mod_base = OTHER; note = 2'-fluorocytidine
  modified_base 5: mod_base = OTHER; note = 2'-O-methyladenosine
  modified_base 6: mod_base = OTHER; note = 2'-fluorouridine
  modified_base 7: mod_base = OTHER; note = 2'-O-methyladenosine
  modified_base 8: mod_base = OTHER; note = 2'-fluorocytidine
  modified_base 9: mod_base = um
  modified_base 10: mod_base = OTHER; note = 2'-fluorouridine
  modified_base 11: mod_base = um
  modified_base 12: mod_base = OTHER; note = 2'-fluorouridine
  modified_base 13: mod_base = cm
  modified_base 14: mod_base = OTHER; note = 2'-fluoroadenosine
  modified_base 15: mod_base = um
  modified_base 16: mod_base = OTHER; note = 2'-fluorouridine
  modified_base 17: mod_base = cm
  modified_base 18: mod_base = OTHER; note = 2'-fluorouridine
  modified_base 19: mod_base = cm
  modified_base 20: mod_base = OTHER; note = 2'-fluorocytidine
  modified_base 20^21: mod_base = OTHER; note = phosphorothioate linkage
  modified_base 21: mod_base = cm
  source 1..21: mol_type = other RNA
tagcatacttttcattctccc

SEQ ID NO: 1137 - RNA, 21 nt, synthetic construct
  modified_base 1: mod_base = OTHER; note = 5'-cyclopropyl phosphonate-2'-O-methyluridine
  modified_base 1^2: mod_base = OTHER; note = phosphorothioate linkage
  modified_base 2: mod_base = OTHER; note = 2'-fluorocytidine
  modified_base 2^3: mod_base = OTHER; note = phosphorothioate linkage
  modified_base 3: mod_base = OTHER; note = 2'-O-methyladenosine
  modified_base 3^4: mod_base = OTHER; note = phosphorothioate linkage
  modified_base 4: mod_base = OTHER; note = 2'-fluorouridine
  modified_base 5: mod_base = OTHER; note = 2'-O-methyladenosine
  modified_base 6: mod_base = OTHER; note = 2'-fluorocytidine
  modified_base 7: mod_base = OTHER; note = 2'-O-methyladenosine
  modified_base 8: mod_base = OTHER; note = 2'-fluorouridine
  modified_base 9: mod_base = gm
  modified_base 10: mod_base = OTHER; note = 2'-fluorocytidine
  modified_base 11: mod_base = OTHER; note = 2'-O-methyladenosine
  modified_base 12: mod_base = OTHER; note = 2'-fluoroguanosine
  modified_base 13: mod_base = um
  modified_base 14: mod_base = OTHER; note = 2'-fluorouridine
  modified_base 15: mod_base = cm
  modified_base 16: mod_base = OTHER; note = 2'-fluoroguanosine
  modified_base 17: mod_base = OTHER; note = 2'-O-methyladenosine
  modified_base 18: mod_base = OTHER; note = 2'-fluoroguanosine
  modified_base 19: mod_base = OTHER; note = 2'-O-methyladenosine
  modified_base 20: mod_base = OTHER; note = 2'-fluoroadenosine
  modified_base 20^21: mod_base = OTHER; note = phosphorothioate linkage
  modified_base 21: mod_base = gm
  source 1..21: mol_type = other RNA
tcatacatgcagttcgagaag

SEQ ID NO: 1138 - RNA, 21 nt, synthetic construct
  modified_base 1: mod_base = OTHER; note = 5'-cyclopropyl phosphonate-2'-O-methyluridine
  modified_base 1^2: mod_base = OTHER; note = phosphorothioate linkage
  modified_base 2: mod_base = OTHER; note = 2'-fluoroguanosine
  modified_base 2^3: mod_base = OTHER; note = phosphorothioate linkage
  modified_base 3: mod_base = um
  modified_base 3^4: mod_base = OTHER; note = phosphorothioate linkage
  modified_base 4: mod_base = OTHER; note = 2'-fluorocytidine
  modified_base 5: mod_base = OTHER; note = 2'-O-methyladenosine
  modified_base 6: mod_base = OTHER; note = 2'-fluorouridine
  modified_base 7: mod_base = OTHER; note = 2'-O-methyladenosine
  modified_base 8: mod_base = OTHER; note = 2'-fluorocytidine
  modified_base 9: mod_base = OTHER; note = 2'-O-methyladenosine
  modified_base 10: mod_base = OTHER; note = 2'-fluorouridine
  modified_base 11: mod_base = gm
  modified_base 12: mod_base = OTHER; note = 2'-fluorocytidine
  modified_base 13: mod_base = OTHER; note = 2'-O-methyladenosine
  modified_base 14: mod_base = OTHER; note = 2'-fluoroguanosine
  modified_base 15: mod_base = um
  modified_base 16: mod_base = OTHER; note = 2'-fluorouridine
  modified_base 17: mod_base = cm
  modified_base 18: mod_base = OTHER; note = 2'-fluoroguanosine
  modified_base 19: mod_base = OTHER; note = 2'-O-methyladenosine
  modified_base 20: mod_base = OTHER; note = 2'-fluoroguanosine
  modified_base 20^21: mod_base = OTHER; note = phosphorothioate linkage
  modified_base 21: mod_base = cm
  source 1..21: mol_type = other RNA
tgtcatacatgcagttcgagc

SEQ ID NO: 1139 - RNA, 21 nt, synthetic construct
  modified_base 1: mod_base = OTHER; note = 5'-cyclopropyl phosphonate-2'-O-methyluridine
  modified_base 1^2: mod_base = OTHER; note = phosphorothioate linkage
  modified_base 2: mod_base = OTHER; note = 2'-fluorouridine
  modified_base 2^3: mod_base = OTHER; note = phosphorothioate linkage
  modified_base 3: mod_base = gm
  modified_base 3^4: mod_base = OTHER; note = phosphorothioate linkage
  modified_base 4: mod_base = OTHER; note = 2'-fluorouridine
  modified_base 5: mod_base = cm
  modified_base 6: mod_base = OTHER; note = 2'-fluoroadenosine
  modified_base 7: mod_base = um
  modified_base 8: mod_base = OTHER; note = 2'-fluoroadenosine
  modified_base 9: mod_base = cm
  modified_base 10: mod_base = OTHER; note = 2'-fluoroadenosine
  modified_base 11: mod_base = um
  modified_base 12: mod_base = OTHER; note = 2'-fluoroguanosine
  modified_base 13: mod_base = cm
  modified_base 14: mod_base = OTHER; note = 2'-fluoroadenosine
  modified_base 15: mod_base = gm
  modified_base 16: mod_base = OTHER; note = 2'-fluorouridine
  modified_base 17: mod_base = um
  modified_base 18: mod_base = OTHER; note = 2'-fluorocytidine
  modified_base 19: mod_base = gm
  modified_base 20: mod_base = OTHER; note = 2'-fluoroadenosine
  modified_base 20^21: mod_base = OTHER; note = phosphorothioate linkage
  modified_base 21: mod_base = gm
  source 1..21: mol_type = other RNA
ttgtcatacatgcagttcgag

SEQ ID NO: 1140 - RNA, 21 nt, synthetic construct
  modified_base 1: mod_base = OTHER; note = 5'-cyclopropyl phosphonate-2'-O-methyluridine
  modified_base 1^2: mod_base = OTHER; note = phosphorothioate linkage
  modified_base 2: mod_base = OTHER; note = 2'-fluorouridine
  modified_base 2^3: mod_base = OTHER; note = phosphorothioate linkage
  modified_base 3: mod_base = OTHER; note = 2'-O-methyladenosine
  modified_base 3^4: mod_base = OTHER; note = phosphorothioate linkage
  modified_base 4: mod_base = OTHER; note = 2'-fluoroguanosine
  modified_base 5: mod_base = um
  modified_base 6: mod_base = OTHER; note = 2'-fluoroadenosine
  modified_base 7: mod_base = gm
  modified_base 8: mod_base = OTHER; note = 2'-fluorouridine
  modified_base 9: mod_base = cm
  modified_base 10: mod_base = OTHER; note = 2'-fluoroadenosine
  modified_base 11: mod_base = cm
  modified_base 12: mod_base = OTHER; note = 2'-fluoroadenosine
  modified_base 13: mod_base = gm
  modified_base 14: mod_base = OTHER; note = 2'-fluoroadenosine
  modified_base 15: mod_base = OTHER; note = 2'-O-methyladenosine
  modified_base 16: mod_base = OTHER; note = 2'-fluorocytidine
  modified_base 17: mod_base = OTHER; note = 2'-O-methyladenosine
  modified_base 18: mod_base = OTHER; note = 2'-fluoroguanosine
  modified_base 19: mod_base = um
  modified_base 20: mod_base = OTHER; note = 2'-fluoroguanosine
  modified_base 20^21: mod_base = OTHER; note = phosphorothioate linkage
  modified_base 21: mod_base = gm
  source 1..21: mol_type = other RNA
ttagtagtcacagaacagtgg

SEQ ID NO: 1141 - RNA, 21 nt, synthetic construct
  modified_base 1: mod_base = OTHER; note = 5'-cyclopropyl phosphonate-2'-O-methyluridine
  modified_base 1^2: mod_base = OTHER; note = phosphorothioate linkage
  modified_base 2: mod_base = OTHER; note = 2'-fluoroguanosine
  modified_base 2^3: mod_base = OTHER; note = phosphorothioate linkage
  modified_base 3: mod_base = um
  modified_base 3^4: mod_base = OTHER; note = phosphorothioate linkage
  modified_base 4: mod_base = OTHER; note = 2'-fluoroadenosine
  modified_base 5: mod_base = gm
  modified_base 6: mod_base = OTHER; note = 2'-fluorouridine
  modified_base 7: mod_base = OTHER; note = 2'-O-methyladenosine
  modified_base 8: mod_base = OTHER; note = 2'-fluoroguanosine
  modified_base 9: mod_base = um
  modified_base 10: mod_base = OTHER; note = 2'-fluorocytidine
  modified_base 11: mod_base = OTHER; note = 2'-O-methyladenosine
  modified_base 12: mod_base = OTHER; note = 2'-fluorocytidine
  modified_base 13: mod_base = OTHER; note = 2'-O-methyladenosine
  modified_base 14: mod_base = OTHER; note = 2'-fluoroguanosine
  modified_base 15: mod_base = OTHER; note = 2'-O-methyladenosine
  modified_base 16: mod_base = OTHER; note = 2'-fluoroadenosine
  modified_base 17: mod_base = cm
  modified_base 18: mod_base = OTHER; note = 2'-fluoroadenosine
  modified_base 19: mod_base = gm
  modified_base 20: mod_base = OTHER; note = 2'-fluorouridine
  modified_base 20^21: mod_base = OTHER; note = phosphorothioate linkage
  modified_base 21: mod_base = gm
  source 1..21: mol_type = other RNA
tgtagtagtcacagaacagtg

SEQ ID NO: 1142 - RNA, 21 nt, synthetic construct
  modified_base 1: mod_base = OTHER; note = 5'-cyclopropyl phosphonate-2'-O-methyluridine
  modified_base 1^2: mod_base = OTHER; note = phosphorothioate linkage
  modified_base 2: mod_base = OTHER; note = 2'-fluorouridine
  modified_base 2^3: mod_base = OTHER; note = phosphorothioate linkage
  modified_base 3: mod_base = gm
  modified_base 3^4: mod_base = OTHER; note = phosphorothioate linkage
  modified_base 4: mod_base = OTHER; note = 2'-fluorouridine
  modified_base 5: mod_base = OTHER; note = 2'-O-methyladenosine
  modified_base 6: mod_base = OTHER; note = 2'-fluoroguanosine
  modified_base 7: mod_base = um
  modified_base 8: mod_base = OTHER; note = 2'-fluoroadenosine
  modified_base 9: mod_base = gm
  modified_base 10: mod_base = OTHER; note = 2'-fluorouridine
  modified_base 11: mod_base = cm
  modified_base 12: mod_base = OTHER; note = 2'-O-methylinosine
  modified_base 13: mod_base = cm
  modified_base 14: mod_base = OTHER; note = 2'-fluoroadenosine
  modified_base 15: mod_base = gm
  modified_base 16: mod_base = OTHER; note = 2'-fluoroadenosine
  modified_base 17: mod_base = OTHER; note = 2'-O-methyladenosine
  modified_base 18: mod_base = OTHER; note = 2'-fluorocytidine
  modified_base 19: mod_base = OTHER; note = 2'-O-methyladenosine
  modified_base 20: mod_base = OTHER; note = 2'-fluoroguanosine
  modified_base 20^21: mod_base = OTHER; note = phosphorothioate linkage
  modified_base 21: mod_base = cm
  source 1..21: mol_type = other RNA
ttgtagtagtcncagaacagc

SEQ ID NO: 1143 - RNA, 21 nt, synthetic construct
  modified_base 1: mod_base = OTHER; note = 5'-cyclopropyl phosphonate-2'-O-methyluridine
  modified_base 1^2: mod_base = OTHER; note = phosphorothioate linkage
  modified_base 2: mod_base = OTHER; note = 2'-fluorouridine
  modified_base 2^3: mod_base = OTHER; note = phosphorothioate linkage
  modified_base 3: mod_base = gm
  modified_base 3^4: mod_base = OTHER; note = phosphorothioate linkage
  modified_base 4: mod_base = OTHER; note = 2'-fluorouridine
  modified_base 5: mod_base = OTHER; note = 2'-O-methyladenosine
  modified_base 6: mod_base = OTHER; note = 2'-fluoroguanosine
  modified_base 7: mod_base = um
  modified_base 8: mod_base = OTHER; note = 2'-fluoroadenosine
  modified_base 9: mod_base = gm
  modified_base 10: mod_base = OTHER; note = 2'-fluorouridine
  modified_base 11: mod_base = cm
  modified_base 12: mod_base = gm
  modified_base 13: mod_base = cm
  modified_base 14: mod_base = OTHER; note = 2'-fluoroadenosine
  modified_base 15: mod_base = gm
  modified_base 16: mod_base = OTHER; note = 2'-fluoroadenosine
  modified_base 17: mod_base = OTHER; note = 2'-O-methyladenosine
  modified_base 18: mod_base = OTHER; note = 2'-fluorocytidine
  modified_base 19: mod_base = OTHER; note = 2'-O-methyladenosine
  modified_base 20: mod_base = OTHER; note = 2'-fluoroguanosine
  modified_base 20^21: mod_base = OTHER; note = phosphorothioate linkage
  modified_base 21: mod_base = cm
  source 1..21: mol_type = other RNA
ttgtagtagtcgcagaacagc

SEQ ID NO: 1144 - RNA, 21 nt, synthetic construct
  modified_base 1: mod_base = OTHER; note = 2'-O-methyladenosine
  modified_base 1^2: mod_base = OTHER; note = phosphorothioate linkage
  modified_base 2: mod_base = OTHER; note = 2'-fluorocytidine
  modified_base 2^3: mod_base = OTHER; note = phosphorothioate linkage
  modified_base 3: mod_base = OTHER; note = 2'-O-methyladenosine
  modified_base 3^4: mod_base = OTHER; note = phosphorothioate linkage
  modified_base 4: mod_base = OTHER; note = 2'-fluorouridine
  modified_base 5: mod_base = gm
  modified_base 6: mod_base = OTHER; note = 2'-fluorocytidine
  modified_base 7: mod_base = OTHER; note = 2'-O-methyladenosine
  modified_base 8: mod_base = OTHER; note = 2'-fluoroguanosine
  modified_base 9: mod_base = um
  modified_base 10: mod_base = OTHER; note = 2'-fluorouridine
  modified_base 11: mod_base = cm
  modified_base 12: mod_base = OTHER; note = 2'-fluoroguanosine
  modified_base 13: mod_base = OTHER; note = 2'-O-methyladenosine
  modified_base 14: mod_base = OTHER; note = 2'-fluoroguanosine
  modified_base 15: mod_base = OTHER; note = 2'-O-methyladenosine
  modified_base 16: mod_base = OTHER; note = 2'-fluoroadenosine
  modified_base 17: mod_base = gm
  modified_base 18: mod_base = OTHER; note = 2'-fluoroadenosine
  modified_base 19: mod_base = OTHER; note = 2'-O-methyladenosine
  modified_base 20: mod_base = OTHER; note = 2'-fluoroguanosine
  modified_base 20^21: mod_base = OTHER; note = phosphorothioate linkage
  modified_base 21: mod_base = gm
  source 1..21: mol_type = other RNA
acatgcagttcgagaagaagg

SEQ ID NO: 1145 - RNA, 21 nt, synthetic construct
  modified_base 1: mod_base = OTHER; note = 5'-cyclopropyl phosphonate-2'-O-methyladenosine
  modified_base 1^2: mod_base = OTHER; note = phosphorothioate linkage
  modified_base 2: mod_base = OTHER; note = 2'-fluorocytidine
  modified_base 2^3: mod_base = OTHER; note = phosphorothioate linkage
  modified_base 3: mod_base = OTHER; note = 2'-O-methyladenosine
  modified_base 3^4: mod_base = OTHER; note = phosphorothioate linkage
  modified_base 4: mod_base = OTHER; note = 2'-fluorouridine
  modified_base 5: mod_base = gm
  modified_base 6: mod_base = OTHER; note = 2'-fluorocytidine
  modified_base 7: mod_base = OTHER; note = 2'-O-methyladenosine
  modified_base 8: mod_base = OTHER; note = 2'-fluoroguanosine
  modified_base 9: mod_base = um
  modified_base 10: mod_base = OTHER; note = 2'-fluorouridine
  modified_base 11: mod_base = cm
  modified_base 12: mod_base = OTHER; note = 2'-fluoroguanosine
  modified_base 13: mod_base = OTHER; note = 2'-O-methyladenosine
  modified_base 14: mod_base = OTHER; note = 2'-fluoroguanosine
  modified_base 15: mod_base = OTHER; note = 2'-O-methyladenosine
  modified_base 16: mod_base = OTHER; note = 2'-fluoroadenosine
  modified_base 17: mod_base = gm
  modified_base 18: mod_base = OTHER; note = 2'-fluoroadenosine
  modified_base 19: mod_base = OTHER; note = 2'-O-methyladenosine
  modified_base 20: mod_base = OTHER; note = 2'-fluoroguanosine
  modified_base 20^21: mod_base = OTHER; note = phosphorothioate linkage
  modified_base 21: mod_base = gm
  source 1..21: mol_type = other RNA
acatgcagttcgagaagaagg

SEQ ID NO: 1146 - RNA, 21 nt, synthetic construct
  modified_base 1: mod_base = OTHER; note = 5'-cyclopropyl phosphonate-2'-O-methyladenosine
  modified_base 1^2: mod_base = OTHER; note = phosphorothioate linkage
  modified_base 2: mod_base = OTHER; note = 2'-fluorouridine
  modified_base 2^3: mod_base = OTHER; note = phosphorothioate linkage
  modified_base 3: mod_base = OTHER; note = 2'-O-methyladenosine
  modified_base 3^4: mod_base = OTHER; note = phosphorothioate linkage
  modified_base 4: mod_base = OTHER; note = 2'-fluoroguanosine
  modified_base 5: mod_base = um
  modified_base 6: mod_base = OTHER; note = 2'-fluorouridine
  modified_base 7: mod_base = gm
  modified_base 8: mod_base = OTHER; note = 2'-fluorouridine
  modified_base 9: mod_base = OTHER; note = 2'-O-methyladenosine
  modified_base 10: mod_base = OTHER; note = 2'-fluoroguanosine
  modified_base 11: mod_base = cm
  modified_base 12: mod_base = OTHER; note = 2'-fluoroadenosine
  modified_base 13: mod_base = cm
  modified_base 14: mod_base = OTHER; note = 2'-fluoroadenosine
  modified_base 15: mod_base = um
  modified_base 16: mod_base = OTHER; note = 2'-fluoroguanosine
  modified_base 17: mod_base = gm
  modified_base 18: mod_base = OTHER; note = 2'-fluoroguanosine
  modified_base 19: mod_base = um
  modified_base 20: mod_base = OTHER; note = 2'-fluoroguanosine
  modified_base 20^21: mod_base = OTHER; note = phosphorothioate linkage
  modified_base 21: mod_base = gm
  source 1..21: mol_type = other RNA
atagttgtagcacatgggtgg

SEQ ID NO: 1147 - RNA, 21 nt, synthetic construct
  modified_base 1: mod_base = OTHER; note = 5'-cyclopropyl phosphonate-2'-O-methyladenosine
  modified_base 1^2: mod_base = OTHER; note = phosphorothioate linkage
  modified_base 2: mod_base = OTHER; note = 2'-fluorouridine
  modified_base 2^3: mod_base = OTHER; note = phosphorothioate linkage
  modified_base 3: mod_base = OTHER; note = 2'-O-methyladenosine
  modified_base 3^4: mod_base = OTHER; note = phosphorothioate linkage
  modified_base 4: mod_base = gm
  modified_base 5: mod_base = um
  modified_base 6: mod_base = um
  modified_base 7: mod_base = gm
  modified_base 8: mod_base = um
  modified_base 9: mod_base = OTHER; note = 2'-O-methyladenosine
  modified_base 10: mod_base = gm
  modified_base 11: mod_base = cm
  modified_base 12: mod_base = OTHER; note = 2'-fluoroadenosine
  modified_base 13: mod_base = cm
  modified_base 14: mod_base = OTHER; note = 2'-fluoroadenosine
  modified_base 15: mod_base = um
  modified_base 16: mod_base = OTHER; note = 2'-fluoroguanosine
  modified_base 17: mod_base = gm
  modified_base 18: mod_base = gm
  modified_base 19: mod_base = um
  modified_base 20: mod_base = gm
  modified_base 20^21: mod_base = OTHER; note = phosphorothioate linkage
  modified_base 21: mod_base = gm
  source 1..21: mol_type = other RNA
atagttgtagcacatgggtgg

SEQ ID NO: 1148 - RNA, 21 nt, synthetic construct
  modified_base 1: mod_base = OTHER; note = 5'-cyclopropyl phosphonate-2'-O-methyluridine
  modified_base 1^2: mod_base = OTHER; note = phosphorothioate linkage
  modified_base 2: mod_base = OTHER; note = 2'-fluoroguanosine
  modified_base 2^3: mod_base = OTHER; note = phosphorothioate linkage
  modified_base 3: mod_base = gm
  modified_base 3^4: mod_base = OTHER; note = phosphorothioate linkage
  modified_base 4: mod_base = OTHER; note = 2'-O-methyladenosine
  modified_base 5: mod_base = um
  modified_base 6: mod_base = cm
  modified_base 7: mod_base = um
  modified_base 8: mod_base = cm
  modified_base 9: mod_base = OTHER; note = 2'-O-methyladenosine
  modified_base 10: mod_base = um
  modified_base 11: mod_base = OTHER; note = 2'-O-methyladenosine
  modified_base 12: mod_base = OTHER; note = 2'-fluoroguanosine
  modified_base 13: mod_base = um
  modified_base 14: mod_base = OTHER; note = 2'-fluorouridine
  modified_base 15: mod_base = gm
  modified_base 16: mod_base = OTHER; note = 2'-fluorouridine
  modified_base 17: mod_base = OTHER; note = 2'-O-methyladenosine
  modified_base 18: mod_base = gm
  modified_base 19: mod_base = cm
  modified_base 20: mod_base = OTHER; note = 2'-O-methyladenosine
  modified_base 20^21: mod_base = OTHER; note = phosphorothioate linkage
  modified_base 21: mod_base = gm
  source 1..21: mol_type = other RNA
tggatctcatagttgtagcag

SEQ ID NO: 1149 - RNA, 21 nt, synthetic construct
  modified_base 1: mod_base = OTHER; note = 5'-cyclopropyl phosphonate-2'-O-methyluridine
  modified_base 1^2: mod_base = OTHER; note = phosphorothioate linkage
  modified_base 2: mod_base = OTHER; note = 2'-fluorouridine
  modified_base 2^3: mod_base = OTHER; note = phosphorothioate linkage
  modified_base 3: mod_base = gm
  modified_base 3^4: mod_base = OTHER; note = phosphorothioate linkage
  modified_base 4: mod_base = um
  modified_base 5: mod_base = um
  modified_base 6: mod_base = gm
  modified_base 7: mod_base = um
  modified_base 8: mod_base = um
  modified_base 9: mod_base = gm
  modified_base 10: mod_base = OTHER; note = 2'-O-methyladenosine
  modified_base 11: mod_base = OTHER; note = 2'-O-methyladenosine
  modified_base 12: mod_base = OTHER; note = 2'-fluoroguanosine
  modified_base 13: mod_base = OTHER; note = 2'-O-methyladenosine
  modified_base 14: mod_base = OTHER; note = 2'-fluorouridine
  modified_base 15: mod_base = gm
  modified_base 16: mod_base = OTHER; note = 2'-fluoroadenosine
  modified_base 17: mod_base = um
  modified_base 18: mod_base = cm
  modified_base 19: mod_base = um
  modified_base 20: mod_base = cm
  modified_base 20^21: mod_base = OTHER; note = phosphorothioate linkage
  modified_base 21: mod_base = gm
  source 1..21: mol_type = other RNA
ttgttgttgaagatgatctcg

SEQ ID NO: 1150 - RNA, 21 nt, synthetic construct
  modified_base 1: mod_base = OTHER; note = 5'-cyclopropyl phosphonate-2'-O-methyluridine
  modified_base 1^2: mod_base = OTHER; note = phosphorothioate linkage
  modified_base 2: mod_base = OTHER; note = 2'-fluoroguanosine
  modified_base 2^3: mod_base = OTHER; note = phosphorothioate linkage
  modified_base 3: mod_base = um
  modified_base 3^4: mod_base = OTHER; note = phosphorothioate linkage
  modified_base 4: mod_base = OTHER; note = 2'-fluoroadenosine
  modified_base 5: mod_base = gm
  modified_base 6: mod_base = um
  modified_base 7: mod_base = OTHER; note = 2'-O-methyladenosine
  modified_base 8: mod_base = gm
  modified_base 9: mod_base = um
  modified_base 10: mod_base = cm
  modified_base 11: mod_base = OTHER; note = 2'-O-methyladenosine
  modified_base 12: mod_base = OTHER; note = 2'-fluorocytidine
  modified_base 13: mod_base = OTHER; note = 2'-O-methyladenosine
  modified_base 14: mod_base = OTHER; note = 2'-fluoroguanosine
  modified_base 15: mod_base = OTHER; note = 2'-O-methyladenosine
  modified_base 16: mod_base = OTHER; note = 2'-fluoroadenosine
  modified_base 17: mod_base = cm
  modified_base 18: mod_base = OTHER; note = 2'-O-methyladenosine
  modified_base 19: mod_base = gm
  modified_base 20: mod_base = um
  modified_base 20^21: mod_base = OTHER; note = phosphorothioate linkage
  modified_base 21: mod_base = gm
  source 1..21: mol_type = other RNA
tgtagtagtcacagaacagtg

SEQ ID NO: 1151 - RNA, 21 nt, synthetic construct
  modified_base 1: mod_base = OTHER; note = 5'-cyclopropyl phosphonate-2'-O-methyluridine
  modified_base 1^2: mod_base = OTHER; note = phosphorothioate linkage
  modified_base 2: mod_base = OTHER; note = 2'-fluoroguanosine
  modified_base 2^3: mod_base = OTHER; note = phosphorothioate linkage
  modified_base 3: mod_base = um
  modified_base 3^4: mod_base = OTHER; note = phosphorothioate linkage
  modified_base 4: mod_base = OTHER; note = 2'-O-methyladenosine
  modified_base 5: mod_base = gm
  modified_base 6: mod_base = um
  modified_base 7: mod_base = OTHER; note = 2'-O-methyladenosine
  modified_base 8: mod_base = gm
  modified_base 9: mod_base = um
  modified_base 10: mod_base = cm
  modified_base 11: mod_base = OTHER; note = 2'-O-methyladenosine
  modified_base 12: mod_base = OTHER; note = 2'-fluorocytidine
  modified_base 13: mod_base = OTHER; note = 2'-O-methyladenosine
  modified_base 14: mod_base = OTHER; note = 2'-fluoroguanosine
  modified_base 15: mod_base = OTHER; note = 2'-O-methyladenosine
  modified_base 16: mod_base = OTHER; note = 2'-fluoroadenosine
  modified_base 17: mod_base = cm
  modified_base 18: mod_base = OTHER; note = 2'-O-methyladenosine
  modified_base 19: mod_base = gm
  modified_base 20: mod_base = um
  modified_base 20^21: mod_base = OTHER; note = phosphorothioate linkage
  modified_base 21: mod_base = gm
  source 1..21: mol_type = other RNA
tgtagtagtcacagaacagtg

SEQ ID NO: 1152 - RNA, 21 nt, synthetic construct
  modified_base 1: mod_base = OTHER; note = 5'-cyclopropyl phosphonate-2'-O-methyluridine
  modified_base 1^2: mod_base = OTHER; note = phosphorothioate linkage
  modified_base 2: mod_base = OTHER; note = 2'-fluoroguanosine
  modified_base 2^3: mod_base = OTHER; note = phosphorothioate linkage
  modified_base 3: mod_base = um
  modified_base 3^4: mod_base = OTHER; note = phosphorothioate linkage
  modified_base 4: mod_base = OTHER; note = 2'-O-methyladenosine
  modified_base 5: mod_base = gm
  modified_base 6: mod_base = um
  modified_base 7: mod_base = OTHER; note = 2'-O-methyladenosine
  modified_base 8: mod_base = gm
  modified_base 9: mod_base = um
  modified_base 10: mod_base = cm
  modified_base 11: mod_base = OTHER; note = 2'-O-methyladenosine
  modified_base 12: mod_base = OTHER; note = 2'-fluorocytidine
  modified_base 13: mod_base = OTHER; note = 2'-O-methyladenosine
  modified_base 14: mod_base = OTHER; note = 2'-fluoroguanosine
  modified_base 15: mod_base = OTHER; note = 2'-O-methyladenosine
  modified_base 16: mod_base = OTHER; note = 2'-fluoroadenosine
  modified_base 17: mod_base = cm
  modified_base 18: mod_base = OTHER; note = 2'-O-methyladenosine
  modified_base 19: mod_base = gm
  modified_base 20: mod_base = um
  modified_base 20^21: mod_base = OTHER; note = phosphorothioate linkage
  modified_base 21: mod_base = cm
  source 1..21: mol_type = other RNA
tgtagtagtcacagaacagtc

SEQ ID NO: 1153 - RNA, 21 nt, synthetic construct
  modified_base 1: mod_base = um
  modified_base 1^2: mod_base = OTHER; note = phosphorothioate linkage
  modified_base 2: mod_base = OTHER; note = 2'-fluoroguanosine
  modified_base 2^3: mod_base = OTHER; note = phosphorothioate linkage
  modified_base 3: mod_base = gm
  modified_base 3^4: mod_base = OTHER; note = phosphorothioate linkage
  modified_base 4: mod_base = OTHER; note = 2'-fluorouridine
  modified_base 5: mod_base = um
  modified_base 6: mod_base = OTHER; note = 2'-fluorocytidine
  modified_base 7: mod_base = OTHER; note = 2'-O-methyladenosine
  modified_base 8: mod_base = OTHER; note = 2'-fluoroguanosine
  modified_base 9: mod_base = gm
  modified_base 10: mod_base = OTHER; note = 2'-fluoroadenosine
  modified_base 11: mod_base = OTHER; note = 2'-O-methyladenosine
  modified_base 12: mod_base = OTHER; note = 2'-fluorocytidine
  modified_base 13: mod_base = OTHER; note = 2'-O-methyladenosine
  modified_base 14: mod_base = OTHER; note = 2'-fluorocytidine
  modified_base 15: mod_base = um
  modified_base 16: mod_base = OTHER; note = 2'-fluorouridine
  modified_base 17: mod_base = cm
  modified_base 18: mod_base = OTHER; note = 2'-fluorocytidine
  modified_base 19: mod_base = cm
  modified_base 20: mod_base = OTHER; note = 2'-fluorocytidine
  modified_base 20^21: mod_base = OTHER; note = phosphorothioate linkage
  modified_base 21: mod_base = OTHER; note = 2'-O-methyladenosine
  source 1..21: mol_type = other RNA
tggttcaggaacacttcccca

SEQ ID NO: 1154 - RNA, 21 nt, synthetic construct
  modified_base 1: mod_base = um
  modified_base 1^2: mod_base = OTHER; note = phosphorothioate linkage
  modified_base 2: mod_base = OTHER; note = 2'-fluorocytidine
  modified_base 2^3: mod_base = OTHER; note = phosphorothioate linkage
  modified_base 3: mod_base = OTHER; note = 2'-O-methyladenosine
  modified_base 3^4: mod_base = OTHER; note = phosphorothioate linkage
  modified_base 4: mod_base = OTHER; note = 2'-fluoroadenosine
  modified_base 5: mod_base = cm
  modified_base 6: mod_base = OTHER; note = 2'-fluoroadenosine
  modified_base 7: mod_base = cm
  modified_base 8: mod_base = OTHER; note = 2'-fluorouridine
  modified_base 9: mod_base = gm
  modified_base 10: mod_base = OTHER; note = 2'-fluorocytidine
  modified_base 11: mod_base = OTHER; note = 2'-O-methyladenosine
  modified_base 12: mod_base = OTHER; note = 2'-fluoroguanosine
  modified_base 13: mod_base = gm
  modified_base 14: mod_base = OTHER; note = 2'-fluorouridine
  modified_base 15: mod_base = gm
  modified_base 16: mod_base = OTHER; note = 2'-fluoroadenosine
  modified_base 17: mod_base = um
  modified_base 18: mod_base = OTHER; note = 2'-fluoroguanosine
  modified_base 19: mod_base = um
  modified_base 20: mod_base = OTHER; note = 2'-fluorocytidine
  modified_base 20^21: mod_base = OTHER; note = phosphorothioate linkage
  modified_base 21: mod_base = cm
  source 1..21: mol_type = other RNA
tcaacactgcaggtgatgtcc

SEQ ID NO: 1155 - RNA, 21 nt, synthetic construct
  modified_base 1: mod_base = um
  modified_base 1^2: mod_base = OTHER; note = phosphorothioate linkage
  modified_base 2: mod_base = OTHER; note = 2'-fluoroadenosine
  modified_base 2^3: mod_base = OTHER; note = phosphorothioate linkage
  modified_base 3: mod_base = um
  modified_base 3^4: mod_base = OTHER; note = phosphorothioate linkage
  modified_base 4: mod_base = OTHER; note = 2'-fluoroguanosine
  modified_base 5: mod_base = um
  modified_base 6: mod_base = OTHER; note = 2'-fluorocytidine
  modified_base 7: mod_base = gm
  modified_base 8: mod_base = OTHER; note = 2'-fluorouridine
  modified_base 9: mod_base = cm
  modified_base 10: mod_base = OTHER; note = 2'-fluoroguanosine
  modified_base 11: mod_base = OTHER; note = 2'-O-methyladenosine
  modified_base 12: mod_base = OTHER; note = 2'-fluoroadenosine
  modified_base 13: mod_base = gm
  modified_base 14: mod_base = OTHER; note = 2'-fluorouridine
  modified_base 15: mod_base = um
  modified_base 16: mod_base = OTHER; note = 2'-fluorocytidine
  modified_base 17: mod_base = cm
  modified_base 18: mod_base = OTHER; note = 2'-fluorocytidine
  modified_base 19: mod_base = OTHER; note = 2'-O-methyladenosine
  modified_base 20: mod_base = OTHER; note = 2'-fluorocytidine
  modified_base 20^21: mod_base = OTHER; note = phosphorothioate linkage
  modified_base 21: mod_base = OTHER; note = 2'-O-methyladenosine
  source 1..21: mol_type = other RNA
tatgtcgtcgaagttcccaca

SEQ ID NO: 1156 - RNA, 21 nt, synthetic construct
  modified_base 1: mod_base = um
  modified_base 1^2: mod_base = OTHER; note = phosphorothioate linkage
  modified_base 2: mod_base = OTHER; note = 2'-fluoroadenosine
  modified_base 2^3: mod_base = OTHER; note = phosphorothioate linkage
  modified_base 3: mod_base = um
  modified_base 3^4: mod_base = OTHER; note = phosphorothioate linkage
  modified_base 4: mod_base = OTHER; note = 2'-fluorocytidine
  modified_base 5: mod_base = um
  modified_base 6: mod_base = OTHER; note = 2'-fluorouridine
  modified_base 7: mod_base = gm
  modified_base 8: mod_base = OTHER; note = 2'-fluorouridine
  modified_base 9: mod_base = cm
  modified_base 10: mod_base = OTHER; note = 2'-fluorocytidine
  modified_base 11: mod_base = um
  modified_base 12: mod_base = OTHER; note = 2'-fluorocytidine
  modified_base 13: mod_base = OTHER; note = 2'-O-methyladenosine
  modified_base 14: mod_base = OTHER; note = 2'-fluorouridine
  modified_base 15: mod_base = cm
  modified_base 16: mod_base = OTHER; note = 2'-fluoroadenosine
  modified_base 17: mod_base = OTHER; note = 2'-O-methyladenosine
  modified_base 18: mod_base = OTHER; note = 2'-fluoroadenosine
  modified_base 19: mod_base = gm
  modified_base 20: mod_base = OTHER; note = 2'-fluoroadenosine
  modified_base 20^21: mod_base = OTHER; note = phosphorothioate linkage
  modified_base 21: mod_base = cm
  source 1..21: mol_type = other RNA
tatcttgtcctcatcaaagac

SEQ ID NO: 1157 - RNA, 21 nt, synthetic construct
  modified_base 1: mod_base = um
  modified_base 1^2: mod_base = OTHER; note = phosphorothioate linkage
  modified_base 2: mod_base = OTHER; note = 2'-fluorouridine
  modified_base 2^3: mod_base = OTHER; note = phosphorothioate linkage
  modified_base 3: mod_base = cm
  modified_base 3^4: mod_base = OTHER; note = phosphorothioate linkage
  modified_base 4: mod_base = OTHER; note = 2'-fluoroguanosine
  modified_base 5: mod_base = um
  modified_base 6: mod_base = OTHER; note = 2'-fluoroguanosine
  modified_base 7: mod_base = um
  modified_base 8: mod_base = OTHER; note = 2'-fluoroguanosine
  modified_base 9: mod_base = gm
  modified_base 10: mod_base = OTHER; note = 2'-fluorouridine
  modified_base 11: mod_base = OTHER; note = 2'-O-methyladenosine
  modified_base 12: mod_base = OTHER; note = 2'-fluoroguanosine
  modified_base 13: mod_base = OTHER; note = 2'-O-methyladenosine
  modified_base 14: mod_base = OTHER; note = 2'-fluorouridine
  modified_base 15: mod_base = gm
  modified_base 16: mod_base = OTHER; note = 2'-fluoroadenosine
  modified_base 17: mod_base = cm
  modified_base 18: mod_base = OTHER; note = 2'-fluoroguanosine
  modified_base 19: mod_base = um
  modified_base 20: mod_base = OTHER; note = 2'-fluorocytidine
  modified_base 20^21: mod_base = OTHER; note = phosphorothioate linkage
  modified_base 21: mod_base = cm
  source 1..21: mol_type = other RNA
ttcgtgtggtagatgacgtcc

SEQ ID NO: 1158 - RNA, 21 nt, synthetic construct
  modified_base 1: mod_base = OTHER; note = 2'-O-methyladenosine
  modified_base 1^2: mod_base = OTHER; note = phosphorothioate linkage
  modified_base 2: mod_base = OTHER; note = 2'-fluorouridine
  modified_base 2^3: mod_base = OTHER; note = phosphorothioate linkage
  modified_base 3: mod_base = um
  modified_base 3^4: mod_base = OTHER; note = phosphorothioate linkage
  modified_base 4: mod_base = OTHER; note = 2'-fluorouridine
  modified_base 5: mod_base = cm
  modified_base 6: mod_base = OTHER; note = 2'-fluorouridine
  modified_base 7: mod_base = gm
  modified_base 8: mod_base = OTHER; note = 2'-fluorocytidine
  modified_base 9: mod_base = cm
  modified_base 10: mod_base = OTHER; note = 2'-fluoroadenosine
  modified_base 11: mod_base = OTHER; note = 2'-O-methyladenosine
  modified_base 12: mod_base = OTHER; note = 2'-fluoroguanosine
  modified_base 13: mod_base = OTHER; note = 2'-O-methyladenosine
  modified_base 14: mod_base = OTHER; note = 2'-fluoroguanosine
  modified_base 15: mod_base = gm
  modified_base 16: mod_base = OTHER; note = 2'-fluoroadenosine
  modified_base 17: mod_base = gm
  modified_base 18: mod_base = OTHER; note = 2'-fluoroguanosine
  modified_base 19: mod_base = um
  modified_base 20: mod_base = OTHER; note = 2'-fluoroguanosine
  modified_base 20^21: mod_base = OTHER; note = phosphorothioate linkage
  modified_base 21: mod_base = cm
  source 1..21: mol_type = other RNA
atttctgccaagaggaggtgc

SEQ ID NO: 1159 - RNA, 21 nt, synthetic construct
  modified_base 1: mod_base = um
  modified_base 1^2: mod_base = OTHER; note = phosphorothioate linkage
  modified_base 2: mod_base = OTHER; note = 2'-fluoroguanosine
  modified_base 2^3: mod_base = OTHER; note = phosphorothioate linkage
  modified_base 3: mod_base = um
  modified_base 3^4: mod_base = OTHER; note = phosphorothioate linkage
  modified_base 4: mod_base = OTHER; note = 2'-fluorouridine
  modified_base 5: mod_base = gm
  modified_base 6: mod_base = OTHER; note = 2'-fluorouridine
  modified_base 7: mod_base = um
  modified_base 8: mod_base = OTHER; note = 2'-fluoroguanosine
  modified_base 9: mod_base = OTHER; note = 2'-O-methyladenosine
  modified_base 10: mod_base = OTHER; note = 2'-fluoroadenosine
  modified_base 11: mod_base = gm
  modified_base 12: mod_base = OTHER; note = 2'-fluoroadenosine
  modified_base 13: mod_base = um
  modified_base 14: mod_base = OTHER; note = 2'-fluoroguanosine
  modified_base 15: mod_base = OTHER; note = 2'-O-methyladenosine
  modified_base 16: mod_base = OTHER; note = 2'-fluorouridine
  modified_base 17: mod_base = cm
  modified_base 18: mod_base = OTHER; note = 2'-fluorouridine
  modified_base 19: mod_base = cm
  modified_base 20: mod_base = OTHER; note = 2'-fluoroguanosine
  modified_base 20^21: mod_base = OTHER; note = phosphorothioate linkage
  modified_base 21: mod_base = um
  source 1..21: mol_type = other RNA
tgttgttgaagatgatctcgt

SEQ ID NO: 1160 - RNA, 21 nt, synthetic construct
  modified_base 1: mod_base = um
  modified_base 1^2: mod_base = OTHER; note = phosphorothioate linkage
  modified_base 2: mod_base = OTHER; note = 2'-fluorouridine
  modified_base 2^3: mod_base = OTHER; note = phosphorothioate linkage
  modified_base 3: mod_base = gm
  modified_base 3^4: mod_base = OTHER; note = phosphorothioate linkage
  modified_base 4: mod_base = OTHER; note = 2'-fluorouridine
  modified_base 5: mod_base = um
  modified_base 6: mod_base = gm
  modified_base 7: mod_base = um
  modified_base 8: mod_base = um
  modified_base 9: mod_base = gm
  modified_base 10: mod_base = OTHER; note = 2'-O-methyladenosine
  modified_base 11: mod_base = OTHER; note = 2'-O-methyladenosine
  modified_base 12: mod_base = OTHER; note = 2'-fluoroguanosine
  modified_base 13: mod_base = OTHER; note = 2'-O-methyladenosine
  modified_base 14: mod_base = OTHER; note = 2'-fluorouridine
  modified_base 15: mod_base = gm
  modified_base 16: mod_base = OTHER; note = 2'-fluoroadenosine
  modified_base 17: mod_base = um
  modified_base 18: mod_base = cm
  modified_base 19: mod_base = um
  modified_base 20: mod_base = cm
  modified_base 20^21: mod_base = OTHER; note = phosphorothioate linkage
  modified_base 21: mod_base = gm
  source 1..21: mol_type = other RNA
ttgttgttgaagatgatctcg

SEQ ID NO: 1161 - RNA, 21 nt, synthetic construct
  modified_base 1: mod_base = um
  modified_base 1^2: mod_base = OTHER; note = phosphorothioate linkage
  modified_base 2: mod_base = OTHER; note = 2'-fluoroguanosine
  modified_base 2^3: mod_base = OTHER; note = phosphorothioate linkage
  modified_base 3: mod_base = um
  modified_base 3^4: mod_base = OTHER; note = phosphorothioate linkage
  modified_base 4: mod_base = OTHER; note = 2'-fluorouridine
  modified_base 5: mod_base = gm
  modified_base 6: mod_base = OTHER; note = 2'-fluorouridine
  modified_base 7: mod_base = um
  modified_base 8: mod_base = OTHER; note = 2'-fluoroguanosine
  modified_base 9: mod_base = um
  modified_base 10: mod_base = OTHER; note = 2'-fluoroadenosine
  modified_base 11: mod_base = gm
  modified_base 12: mod_base = OTHER; note = 2'-fluoroguanosine
  modified_base 13: mod_base = um
  modified_base 14: mod_base = OTHER; note = 2'-fluorouridine
  modified_base 15: mod_base = um
  modified_base 16: mod_base = OTHER; note = 2'-fluorocytidine
  modified_base 17: mod_base = cm
  modified_base 18: mod_base = OTHER; note = 2'-fluorouridine
  modified_base 19: mod_base = um
  modified_base 20: mod_base = OTHER; note = 2'-fluoroguanosine
  modified_base 20^21: mod_base = OTHER; note = phosphorothioate linkage
  modified_base 21: mod_base = cm
  source 1..21: mol_type = other RNA
tgttgttgtaggtttccttgc

SEQ ID NO: 1162 - RNA, 21 nt, synthetic construct
  modified_base 1: mod_base = OTHER; note = 5'-cyclopropyl phosphonate-2'-O-methyluridine
  modified_base 1^2: mod_base = OTHER; note = phosphorothioate linkage
  modified_base 2: mod_base = OTHER; note = 2'-fluoroguanosine
  modified_base 2^3: mod_base = OTHER; note = phosphorothioate linkage
  modified_base 3: mod_base = um
  modified_base 3^4: mod_base = OTHER; note = phosphorothioate linkage
  modified_base 4: mod_base = OTHER; note = 2'-fluorouridine
  modified_base 5: mod_base = gm
  modified_base 6: mod_base = OTHER; note = 2'-fluorouridine
  modified_base 7: mod_base = um
  modified_base 8: mod_base = OTHER; note = 2'-fluoroguanosine
  modified_base 9: mod_base = um
  modified_base 10: mod_base = OTHER; note = 2'-fluoroadenosine
  modified_base 11: mod_base = gm
  modified_base 12: mod_base = OTHER; note = 2'-fluoroguanosine
  modified_base 13: mod_base = um
  modified_base 14: mod_base = OTHER; note = 2'-fluorouridine
  modified_base 15: mod_base = um
  modified_base 16: mod_base = OTHER; note = 2'-fluorocytidine
  modified_base 17: mod_base = cm
  modified_base 18: mod_base = OTHER; note = 2'-fluorouridine
  modified_base 19: mod_base = um
  modified_base 20: mod_base = OTHER; note = 2'-fluoroguanosine
  modified_base 20^21: mod_base = OTHER; note = phosphorothioate linkage
  modified_base 21: mod_base = cm
  source 1..21: mol_type = other RNA
tgttgttgtaggtttccttgc

SEQ ID NO: 1163 - RNA, 21 nt, synthetic construct
  modified_base 1: mod_base = um
  modified_base 1^2: mod_base = OTHER; note = phosphorothioate linkage
  modified_base 2: mod_base = OTHER; note = 2'-fluoroguanosine
  modified_base 2^3: mod_base = OTHER; note = phosphorothioate linkage
  modified_base 3: mod_base = um
  modified_base 3^4: mod_base = OTHER; note = phosphorothioate linkage
  modified_base 4: mod_base = um
  modified_base 5: mod_base = gm
  modified_base 6: mod_base = um
  modified_base 7: mod_base = um
  modified_base 8: mod_base = gm
  modified_base 9: mod_base = um
  modified_base 10: mod_base = OTHER; note = 2'-O-methyladenosine
  modified_base 11: mod_base = gm
  modified_base 12: mod_base = OTHER; note = 2'-fluoroguanosine
  modified_base 13: mod_base = um
  modified_base 14: mod_base = OTHER; note = 2'-fluorouridine
  modified_base 15: mod_base = um
  modified_base 16: mod_base = OTHER; note = 2'-fluorocytidine
  modified_base 17: mod_base = cm
  modified_base 18: mod_base = um
  modified_base 19: mod_base = um
  modified_base 20: mod_base = gm
  modified_base 20^21: mod_base = OTHER; note = phosphorothioate linkage
  modified_base 21: mod_base = cm
  source 1..21: mol_type = other RNA
tgttgttgtaggtttccttgc

SEQ ID NO: 1164 - RNA, 21 nt, synthetic construct
  modified_base 1: mod_base = OTHER; note = 5'-cyclopropyl phosphonate-2'-O-methyluridine
  modified_base 1^2: mod_base = OTHER; note = phosphorothioate linkage
  modified_base 2: mod_base = OTHER; note = 2'-fluoroguanosine
  modified_base 2^3: mod_base = OTHER; note = phosphorothioate linkage
  modified_base 3: mod_base = um
  modified_base 3^4: mod_base = OTHER; note = phosphorothioate linkage
  modified_base 4: mod_base = um
  modified_base 5: mod_base = gm
  modified_base 6: mod_base = um
  modified_base 7: mod_base = um
  modified_base 8: mod_base = gm
  modified_base 9: mod_base = um
  modified_base 10: mod_base = OTHER; note = 2'-O-methyladenosine
  modified_base 11: mod_base = gm
  modified_base 12: mod_base = OTHER; note = 2'-fluoroguanosine
  modified_base 13: mod_base = um
  modified_base 14: mod_base = OTHER; note = 2'-fluorouridine
  modified_base 15: mod_base = um
  modified_base 16: mod_base = OTHER; note = 2'-fluorocytidine
  modified_base 17: mod_base = cm
  modified_base 18: mod_base = um
  modified_base 19: mod_base = um
  modified_base 20: mod_base = gm
  modified_base 20^21: mod_base = OTHER; note = phosphorothioate linkage
  modified_base 21: mod_base = cm
  source 1..21: mol_type = other RNA
tgttgttgtaggtttccttgc

SEQ ID NO: 1165 - RNA, 21 nt, synthetic construct
  modified_base 1: mod_base = OTHER; note = 5'-cyclopropyl phosphonate-2'-O-methyluridine
  modified_base 1^2: mod_base = OTHER; note = phosphorothioate linkage
  modified_base 2: mod_base = OTHER; note = 2'-fluorouridine
  modified_base 2^3: mod_base = OTHER; note = phosphorothioate linkage
  modified_base 3: mod_base = cm
  modified_base 3^4: mod_base = OTHER; note = phosphorothioate linkage
  modified_base 4: mod_base = OTHER; note = 2'-fluorouridine
  modified_base 5: mod_base = um
  modified_base 6: mod_base = OTHER; note = 2'-fluoroguanosine
  modified_base 7: mod_base = um
  modified_base 8: mod_base = OTHER; note = 2'-fluorouridine
  modified_base 9: mod_base = cm
  modified_base 10: mod_base = OTHER; note = 2'-fluoroadenosine
  modified_base 11: mod_base = gm
  modified_base 12: mod_base = OTHER; note = 2'-fluoroguanosine
  modified_base 13: mod_base = cm
  modified_base 14: mod_base = OTHER; note = 2'-fluoroadenosine
  modified_base 15: mod_base = OTHER; note = 2'-O-methyladenosine
  modified_base 16: mod_base = OTHER; note = 2'-fluoroadenosine
  modified_base 17: mod_base = um
  modified_base 18: mod_base = OTHER; note = 2'-fluorocytidine
  modified_base 19: mod_base = OTHER; note = 2'-O-methyladenosine
  modified_base 20: mod_base = OTHER; note = 2'-fluoroguanosine
  modified_base 20^21: mod_base = OTHER; note = phosphorothioate linkage
  modified_base 21: mod_base = cm
  source 1..21: mol_type = other RNA
ttcttgttcaggcaaatcagc

SEQ ID NO: 1166 - RNA, 21 nt, synthetic construct
  modified_base 1: mod_base = um
  modified_base 1^2: mod_base = OTHER; note = phosphorothioate linkage
  modified_base 2: mod_base = OTHER; note = 2'-fluorouridine
  modified_base 2^3: mod_base = OTHER; note = phosphorothioate linkage
  modified_base 3: mod_base = cm
  modified_base 3^4: mod_base = OTHER; note = phosphorothioate linkage
  modified_base 4: mod_base = um
  modified_base 5: mod_base = um
  modified_base 6: mod_base = gm
  modified_base 7: mod_base = um
  modified_base 8: mod_base = um
  modified_base 9: mod_base = cm
  modified_base 10: mod_base = OTHER; note = 2'-O-methyladenosine
  modified_base 11: mod_base = gm
  modified_base 12: mod_base = OTHER; note = 2'-fluoroguanosine
  modified_base 13: mod_base = cm
  modified_base 14: mod_base = OTHER; note = 2'-fluoroadenosine
  modified_base 15: mod_base = OTHER; note = 2'-O-methyladenosine
  modified_base 16: mod_base = OTHER; note = 2'-fluoroadenosine
  modified_base 17: mod_base = um
  modified_base 18: mod_base = cm
  modified_base 19: mod_base = OTHER; note = 2'-O-methyladenosine
  modified_base 20: mod_base = gm
  modified_base 20^21: mod_base = OTHER; note = phosphorothioate linkage
  modified_base 21: mod_base = cm
  source 1..21: mol_type = other RNA
ttcttgttcaggcaaatcagc

SEQ ID NO: 1167 - RNA, 21 nt, synthetic construct
  modified_base 1: mod_base = OTHER; note = 5'-cyclopropyl phosphonate-2'-O-methyluridine
  modified_base 1^2: mod_base = OTHER; note = phosphorothioate linkage
  modified_base 2: mod_base = OTHER; note = 2'-fluorouridine
  modified_base 2^3: mod_base = OTHER; note = phosphorothioate linkage
  modified_base 3: mod_base = cm
  modified_base 3^4: mod_base = OTHER; note = phosphorothioate linkage
  modified_base 4: mod_base = um
  modified_base 5: mod_base = um
  modified_base 6: mod_base = gm
  modified_base 7: mod_base = um
  modified_base 8: mod_base = um
  modified_base 9: mod_base = cm
  modified_base 10: mod_base = OTHER; note = 2'-O-methyladenosine
  modified_base 11: mod_base = gm
  modified_base 12: mod_base = OTHER; note = 2'-fluoroguanosine
  modified_base 13: mod_base = cm
  modified_base 14: mod_base = OTHER; note = 2'-fluoroadenosine
  modified_base 15: mod_base = OTHER; note = 2'-O-methyladenosine
  modified_base 16: mod_base = OTHER; note = 2'-fluoroadenosine
  modified_base 17: mod_base = um
  modified_base 18: mod_base = cm
  modified_base 19: mod_base = OTHER; note = 2'-O-methyladenosine
  modified_base 20: mod_base = gm
  modified_base 20^21: mod_base = OTHER; note = phosphorothioate linkage
  modified_base 21: mod_base = cm
  source 1..21: mol_type = other RNA
ttcttgttcaggcaaatcagc

SEQ ID NO: 1168 - RNA, 21 nt, synthetic construct
  modified_base 1: mod_base = OTHER; note = 5'-cyclopropyl phosphonate-2'-O-methyluridine
  modified_base 1^2: mod_base = OTHER; note = phosphorothioate linkage
  modified_base 2: mod_base = OTHER; note = 2'-fluorouridine
  modified_base 2^3: mod_base = OTHER; note = phosphorothioate linkage
  modified_base 3: mod_base = cm
  modified_base 3^4: mod_base = OTHER; note = phosphorothioate linkage
  modified_base 4: mod_base = um
  modified_base 5: mod_base = um
  modified_base 6: mod_base = gm
  modified_base 7: mod_base = OTHER; note = 2',3'-seco-uridine
  modified_base 8: mod_base = um
  modified_base 9: mod_base = cm
  modified_base 10: mod_base = OTHER; note = 2'-O-methyladenosine
  modified_base 11: mod_base = gm
  modified_base 12: mod_base = OTHER; note = 2'-fluoroguanosine
  modified_base 13: mod_base = cm
  modified_base 14: mod_base = OTHER; note = 2'-fluoroadenosine
  modified_base 15: mod_base = OTHER; note = 2'-O-methyladenosine
  modified_base 16: mod_base = OTHER; note = 2'-fluoroadenosine
  modified_base 17: mod_base = um
  modified_base 18: mod_base = cm
  modified_base 19: mod_base = OTHER; note = 2'-O-methyladenosine
  modified_base 20: mod_base = gm
  modified_base 20^21: mod_base = OTHER; note = phosphorothioate linkage
  modified_base 21: mod_base = cm
  source 1..21: mol_type = other RNA
ttcttgttcaggcaaatcagc

SEQ ID NO: 1169 - RNA, 21 nt, synthetic construct
  modified_base 1: mod_base = OTHER; note = 5'-cyclopropyl phosphonate-2'-O-methyluridine
  modified_base 1^2: mod_base = OTHER; note = phosphorothioate linkage
  modified_base 2: mod_base = OTHER; note = 2'-fluorocytidine
  modified_base 2^3: mod_base = OTHER; note = phosphorothioate linkage
  modified_base 3: mod_base = um
  modified_base 3^4: mod_base = OTHER; note = phosphorothioate linkage
  modified_base 4: mod_base = OTHER; note = 2'-fluorouridine
  modified_base 5: mod_base = gm
  modified_base 6: mod_base = OTHER; note = 2'-fluorouridine
  modified_base 7: mod_base = um
  modified_base 8: mod_base = OTHER; note = 2'-fluorocytidine
  modified_base 9: mod_base = OTHER; note = 2'-O-methyladenosine
  modified_base 10: mod_base = OTHER; note = 2'-fluoroguanosine
  modified_base 11: mod_base = gm
  modified_base 12: mod_base = OTHER; note = 2'-fluorocytidine
  modified_base 13: mod_base = OTHER; note = 2'-O-methyladenosine
  modified_base 14: mod_base = OTHER; note = 2'-fluoroadenosine
  modified_base 15: mod_base = OTHER; note = 2'-O-methyladenosine
  modified_base 16: mod_base = OTHER; note = 2'-fluorouridine
  modified_base 17: mod_base = cm
  modified_base 18: mod_base = OTHER; note = 2'-fluoroadenosine
  modified_base 19: mod_base = gm
  modified_base 20: mod_base = OTHER; note = 2'-fluorocytidine
  modified_base 20^21: mod_base = OTHER; note = phosphorothioate linkage
  modified_base 21: mod_base = cm
  source 1..21: mol_type = other RNA
tcttgttcaggcaaatcagcc

SEQ ID NO: 1170 - RNA, 21 nt, synthetic construct
  modified_base 1: mod_base = um
  modified_base 1^2: mod_base = OTHER; note = phosphorothioate linkage
  modified_base 2: mod_base = OTHER; note = 2'-fluorocytidine
  modified_base 2^3: mod_base = OTHER; note = phosphorothioate linkage
  modified_base 3: mod_base = um
  modified_base 3^4: mod_base = OTHER; note = phosphorothioate linkage
  modified_base 4: mod_base = um
  modified_base 5: mod_base = gm
  modified_base 6: mod_base = um
  modified_base 7: mod_base = um
  modified_base 8: mod_base = cm
  modified_base 9: mod_base = OTHER; note = 2'-O-methyladenosine
  modified_base 10: mod_base = gm
  modified_base 11: mod_base = gm
  modified_base 12: mod_base = OTHER; note = 2'-fluorocytidine
  modified_base 13: mod_base = OTHER; note = 2'-O-methyladenosine
  modified_base 14: mod_base = OTHER; note = 2'-fluoroadenosine
  modified_base 15: mod_base = OTHER; note = 2'-O-methyladenosine
  modified_base 16: mod_base = OTHER; note = 2'-fluorouridine
  modified_base 17: mod_base = cm
  modified_base 18: mod_base = OTHER; note = 2'-O-methyladenosine
  modified_base 19: mod_base = gm
  modified_base 20: mod_base = cm
  modified_base 20^21: mod_base = OTHER; note = phosphorothioate linkage
  modified_base 21: mod_base = cm
  source 1..21: mol_type = other RNA
tcttgttcaggcaaatcagcc

SEQ ID NO: 1171 - RNA, 21 nt, synthetic construct
  modified_base 1: mod_base = OTHER; note = 5'-cyclopropyl phosphonate-2'-O-methyluridine
  modified_base 1^2: mod_base = OTHER; note = phosphorothioate linkage
  modified_base 2: mod_base = OTHER; note = 2'-fluorocytidine
  modified_base 2^3: mod_base = OTHER; note = phosphorothioate linkage
  modified_base 3: mod_base = um
  modified_base 3^4: mod_base = OTHER; note = phosphorothioate linkage
  modified_base 4: mod_base = um
  modified_base 5: mod_base = gm
  modified_base 6: mod_base = um
  modified_base 7: mod_base = um
  modified_base 8: mod_base = cm
  modified_base 9: mod_base = OTHER; note = 2'-O-methyladenosine
  modified_base 10: mod_base = gm
  modified_base 11: mod_base = gm
  modified_base 12: mod_base = OTHER; note = 2'-fluorocytidine
  modified_base 13: mod_base = OTHER; note = 2'-O-methyladenosine
  modified_base 14: mod_base = OTHER; note = 2'-fluoroadenosine
  modified_base 15: mod_base = OTHER; note = 2'-O-methyladenosine
  modified_base 16: mod_base = OTHER; note = 2'-fluorouridine
  modified_base 17: mod_base = cm
  modified_base 18: mod_base = OTHER; note = 2'-O-methyladenosine
  modified_base 19: mod_base = gm
  modified_base 20: mod_base = cm
  modified_base 20^21: mod_base = OTHER; note = phosphorothioate linkage
  modified_base 21: mod_base = cm
  source 1..21: mol_type = other RNA
tcttgttcaggcaaatcagcc

SEQ ID NO: 1172 - RNA, 21 nt, synthetic construct
  modified_base 1: mod_base = OTHER; note = 5'-cyclopropyl phosphonate-2'-O-methyluridine
  modified_base 1^2: mod_base = OTHER; note = phosphorothioate linkage
  modified_base 2: mod_base = OTHER; note = 2'-fluoroguanosine
  modified_base 2^3: mod_base = OTHER; note = phosphorothioate linkage
  modified_base 3: mod_base = um
  modified_base 3^4: mod_base = OTHER; note = phosphorothioate linkage
  modified_base 4: mod_base = OTHER; note = 2'-fluorouridine
  modified_base 5: mod_base = gm
  modified_base 6: mod_base = OTHER; note = 2'-fluoroadenosine
  modified_base 7: mod_base = um
  modified_base 8: mod_base = OTHER; note = 2'-fluoroguanosine
  modified_base 9: mod_base = OTHER; note = 2'-O-methyladenosine
  modified_base 10: mod_base = OTHER; note = 2'-fluoroadenosine
  modified_base 11: mod_base = gm
  modified_base 12: mod_base = OTHER; note = 2'-fluoroadenosine
  modified_base 13: mod_base = um
  modified_base 14: mod_base = OTHER; note = 2'-fluoroguanosine
  modified_base 15: mod_base = cm
  modified_base 16: mod_base = OTHER; note = 2'-fluorouridine
  modified_base 17: mod_base = gm
  modified_base 18: mod_base = OTHER; note = 2'-fluoroguanosine
  modified_base 19: mod_base = um
  modified_base 20: mod_base = OTHER; note = 2'-fluorocytidine
  modified_base 20^21: mod_base = OTHER; note = phosphorothioate linkage
  modified_base 21: mod_base = cm
  source 1..21: mol_type = other RNA
tgttgatgaagatgctggtcc

SEQ ID NO: 1173 - RNA, 21 nt, synthetic construct
  modified_base 1: mod_base = um
  modified_base 1^2: mod_base = OTHER; note = phosphorothioate linkage
  modified_base 2: mod_base = OTHER; note = 2'-fluoroguanosine
  modified_base 2^3: mod_base = OTHER; note = phosphorothioate linkage
  modified_base 3: mod_base = um
  modified_base 3^4: mod_base = OTHER; note = phosphorothioate linkage
  modified_base 4: mod_base = um
  modified_base 5: mod_base = gm
  modified_base 6: mod_base = OTHER; note = 2'-O-methyladenosine
  modified_base 7: mod_base = um
  modified_base 8: mod_base = gm
  modified_base 9: mod_base = OTHER; note = 2'-O-methyladenosine
  modified_base 10: mod_base = OTHER; note = 2'-O-methyladenosine
  modified_base 11: mod_base = gm
  modified_base 12: mod_base = OTHER; note = 2'-fluoroadenosine
  modified_base 13: mod_base = um
  modified_base 14: mod_base = OTHER; note = 2'-fluoroguanosine
  modified_base 15: mod_base = cm
  modified_base 16: mod_base = OTHER; note = 2'-fluorouridine
  modified_base 17: mod_base = gm
  modified_base 18: mod_base = gm
  modified_base 19: mod_base = um
  modified_base 20: mod_base = cm
  modified_base 20^21: mod_base = OTHER; note = phosphorothioate linkage
  modified_base 21: mod_base = cm
  source 1..21: mol_type = other RNA
tgttgatgaagatgctggtcc

SEQ ID NO: 1174 - RNA, 21 nt, synthetic construct
  modified_base 1: mod_base = OTHER; note = 5'-cyclopropyl phosphonate-2'-O-methyluridine
  modified_base 1^2: mod_base = OTHER; note = phosphorothioate linkage
  modified_base 2: mod_base = OTHER; note = 2'-fluoroguanosine
  modified_base 2^3: mod_base = OTHER; note = phosphorothioate linkage
  modified_base 3: mod_base = um
  modified_base 3^4: mod_base = OTHER; note = phosphorothioate linkage
  modified_base 4: mod_base = um
  modified_base 5: mod_base = gm
  modified_base 6: mod_base = OTHER; note = 2'-O-methyladenosine
  modified_base 7: mod_base = um
  modified_base 8: mod_base = gm
  modified_base 9: mod_base = OTHER; note = 2'-O-methyladenosine
  modified_base 10: mod_base = OTHER; note = 2'-O-methyladenosine
  modified_base 11: mod_base = gm
  modified_base 12: mod_base = OTHER; note = 2'-fluoroadenosine
  modified_base 13: mod_base = um
  modified_base 14: mod_base = OTHER; note = 2'-fluoroguanosine
  modified_base 15: mod_base = cm
  modified_base 16: mod_base = OTHER; note = 2'-fluorouridine
  modified_base 17: mod_base = gm
  modified_base 18: mod_base = gm
  modified_base 19: mod_base = um
  modified_base 20: mod_base = cm
  modified_base 20^21: mod_base = OTHER; note = phosphorothioate linkage
  modified_base 21: mod_base = cm
  source 1..21: mol_type = other RNA
tgttgatgaagatgctggtcc

SEQ ID NO: 1175 - RNA, 21 nt, synthetic construct
  modified_base 1: mod_base = OTHER; note = 5'-cyclopropyl phosphonate-2'-O-methyluridine
  modified_base 1^2: mod_base = OTHER; note = phosphorothioate linkage
  modified_base 2: mod_base = OTHER; note = 2'-fluoroguanosine
  modified_base 2^3: mod_base = OTHER; note = phosphorothioate linkage
  modified_base 3: mod_base = um
  modified_base 3^4: mod_base = OTHER; note = phosphorothioate linkage
  modified_base 4: mod_base = um
  modified_base 5: mod_base = gm
  modified_base 6: mod_base = OTHER; note = 2'-O-methyladenosine
  modified_base 7: mod_base = OTHER; note = 2',3'-seco-uridine
  modified_base 8: mod_base = gm
  modified_base 9: mod_base = OTHER; note = 2'-O-methyladenosine
  modified_base 10: mod_base = OTHER; note = 2'-O-methyladenosine
  modified_base 11: mod_base = gm
  modified_base 12: mod_base = OTHER; note = 2'-fluoroadenosine
  modified_base 13: mod_base = um
  modified_base 14: mod_base = OTHER; note = 2'-fluoroguanosine
  modified_base 15: mod_base = cm
  modified_base 16: mod_base = OTHER; note = 2'-fluorouridine
  modified_base 17: mod_base = gm
  modified_base 18: mod_base = gm
  modified_base 19: mod_base = um
  modified_base 20: mod_base = cm
  modified_base 20^21: mod_base = OTHER; note = phosphorothioate linkage
  modified_base 21: mod_base = cm
  source 1..21: mol_type = other RNA
tgttgatgaagatgctggtcc

SEQ ID NO: 1176 - RNA, 21 nt, synthetic construct
  modified_base 1: mod_base = OTHER; note = 5'-cyclopropyl phosphonate-2'-O-methyluridine
  modified_base 1^2: mod_base = OTHER; note = phosphorothioate linkage
  modified_base 2: mod_base = OTHER; note = 2'-fluorouridine
  modified_base 2^3: mod_base = OTHER; note = phosphorothioate linkage
  modified_base 3: mod_base = gm
  modified_base 3^4: mod_base = OTHER; note = phosphorothioate linkage
  modified_base 4: mod_base = OTHER; note = 2'-fluorouridine
  modified_base 5: mod_base = um
  modified_base 6: mod_base = gm
  modified_base 7: mod_base = OTHER; note = 2',3'-seco-uridine
  modified_base 8: mod_base = um
  modified_base 9: mod_base = gm
  modified_base 10: mod_base = OTHER; note = 2'-O-methyladenosine
  modified_base 11: mod_base = OTHER; note = 2'-O-methyladenosine
  modified_base 12: mod_base = OTHER; note = 2'-fluoroguanosine
  modified_base 13: mod_base = OTHER; note = 2'-O-methyladenosine
  modified_base 14: mod_base = OTHER; note = 2'-fluorouridine
  modified_base 15: mod_base = gm
  modified_base 16: mod_base = OTHER; note = 2'-fluoroadenosine
  modified_base 17: mod_base = um
  modified_base 18: mod_base = cm
  modified_base 19: mod_base = um
  modified_base 20: mod_base = cm
  modified_base 20^21: mod_base = OTHER; note = phosphorothioate linkage
  modified_base 21: mod_base = gm
  source 1..21: mol_type = other RNA
ttgttgttgaagatgatctcg

SEQ ID NO: 1177 - RNA, 21 nt, synthetic construct
  modified_base 1: mod_base = OTHER; note = 5'-cyclopropyl phosphonate-2'-O-methyluridine
  modified_base 1^2: mod_base = OTHER; note = phosphorothioate linkage
  modified_base 2: mod_base = OTHER; note = 2'-fluorouridine
  modified_base 2^3: mod_base = OTHER; note = phosphorothioate linkage
  modified_base 3: mod_base = gm
  modified_base 3^4: mod_base = OTHER; note = phosphorothioate linkage
  modified_base 4: mod_base = OTHER; note = 2'-fluorouridine
  modified_base 5: mod_base = um
  modified_base 6: mod_base = gm
  modified_base 7: mod_base = um
  modified_base 8: mod_base = OTHER; note = 2',3'-seco-uridine
  modified_base 9: mod_base = gm
  modified_base 10: mod_base = OTHER; note = 2'-O-methyladenosine
  modified_base 11: mod_base = OTHER; note = 2'-O-methyladenosine
  modified_base 12: mod_base = OTHER; note = 2'-fluoroguanosine
  modified_base 13: mod_base = OTHER; note = 2'-O-methyladenosine
  modified_base 14: mod_base = OTHER; note = 2'-fluorouridine
  modified_base 15: mod_base = gm
  modified_base 16: mod_base = OTHER; note = 2'-fluoroadenosine
  modified_base 17: mod_base = um
  modified_base 18: mod_base = cm
  modified_base 19: mod_base = um
  modified_base 20: mod_base = cm
  modified_base 20^21: mod_base = OTHER; note = phosphorothioate linkage
  modified_base 21: mod_base = gm
  source 1..21: mol_type = other RNA
ttgttgttgaagatgatctcg

SEQ ID NO: 1178 - RNA, 21 nt, synthetic construct
  modified_base 1: mod_base = OTHER; note = 5'-cyclopropyl phosphonate-2'-O-methyluridine
  modified_base 1^2: mod_base = OTHER; note = phosphorothioate linkage
  modified_base 2: mod_base = OTHER; note = 2'-fluorouridine
  modified_base 2^3: mod_base = OTHER; note = phosphorothioate linkage
  modified_base 3: mod_base = gm
  modified_base 3^4: mod_base = OTHER; note = phosphorothioate linkage
  modified_base 4: mod_base = OTHER; note = 2'-fluorouridine
  modified_base 5: mod_base = OTHER; note = 2',3'-seco-uridine
  modified_base 6: mod_base = gm
  modified_base 7: mod_base = um
  modified_base 8: mod_base = um
  modified_base 9: mod_base = gm
  modified_base 10: mod_base = OTHER; note = 2'-O-methyladenosine
  modified_base 11: mod_base = OTHER; note = 2'-O-methyladenosine
  modified_base 12: mod_base = OTHER; note = 2'-fluoroguanosine
  modified_base 13: mod_base = OTHER; note = 2'-O-methyladenosine
  modified_base 14: mod_base = OTHER; note = 2'-fluorouridine
  modified_base 15: mod_base = gm
  modified_base 16: mod_base = OTHER; note = 2'-fluoroadenosine
  modified_base 17: mod_base = um
  modified_base 18: mod_base = cm
  modified_base 19: mod_base = um
  modified_base 20: mod_base = cm
  modified_base 20^21: mod_base = OTHER; note = phosphorothioate linkage
  modified_base 21: mod_base = gm
  source 1..21: mol_type = other RNA
ttgttgttgaagatgatctcg

SEQ ID NO: 1179 - RNA, 21 nt, synthetic construct
  modified_base 1: mod_base = OTHER; note = 5'-cyclopropyl phosphonate-2'-O-methyluridine
  modified_base 1^2: mod_base = OTHER; note = phosphorothioate linkage
  modified_base 2: mod_base = OTHER; note = 2'-fluorouridine
  modified_base 2^3: mod_base = OTHER; note = phosphorothioate linkage
  modified_base 3: mod_base = gm
  modified_base 3^4: mod_base = OTHER; note = phosphorothioate linkage
  modified_base 4: mod_base = OTHER; note = 2'-O-methylinosine
  modified_base 5: mod_base = um
  modified_base 6: mod_base = gm
  modified_base 7: mod_base = um
  modified_base 8: mod_base = um
  modified_base 9: mod_base = gm
  modified_base 10: mod_base = OTHER; note = 2'-O-methyladenosine
  modified_base 11: mod_base = OTHER; note = 2'-O-methyladenosine
  modified_base 12: mod_base = OTHER; note = 2'-fluoroguanosine
  modified_base 13: mod_base = OTHER; note = 2'-O-methyladenosine
  modified_base 14: mod_base = OTHER; note = 2'-fluorouridine
  modified_base 15: mod_base = gm
  modified_base 16: mod_base = OTHER; note = 2'-fluoroadenosine
  modified_base 17: mod_base = um
  modified_base 18: mod_base = cm
  modified_base 19: mod_base = um
  modified_base 20: mod_base = cm
  modified_base 20^21: mod_base = OTHER; note = phosphorothioate linkage
  modified_base 21: mod_base = gm
  source 1..21: mol_type = other RNA
ttgntgttgaagatgatctcg

SEQ ID NO: 1180 - RNA, 21 nt, synthetic construct
  modified_base 1: mod_base = OTHER; note = 2'-O-methyladenosine
  modified_base 1^2: mod_base = OTHER; note = phosphorothioate linkage
  modified_base 2: mod_base = OTHER; note = 2'-fluorouridine
  modified_base 2^3: mod_base = OTHER; note = phosphorothioate linkage
  modified_base 3: mod_base = cm
  modified_base 3^4: mod_base = OTHER; note = phosphorothioate linkage
  modified_base 4: mod_base = OTHER; note = 2'-fluorouridine
  modified_base 5: mod_base = um
  modified_base 6: mod_base = OTHER; note = 2'-fluoroguanosine
  modified_base 7: mod_base = um
  modified_base 8: mod_base = OTHER; note = 2'-fluorocytidine
  modified_base 9: mod_base = cm
  modified_base 10: mod_base = OTHER; note = 2'-fluorouridine
  modified_base 11: mod_base = cm
  modified_base 12: mod_base = OTHER; note = 2'-fluoroadenosine
  modified_base 13: mod_base = um
  modified_base 14: mod_base = OTHER; note = 2'-fluorocytidine
  modified_base 15: mod_base = OTHER; note = 2'-O-methyladenosine
  modified_base 16: mod_base = OTHER; note = 2'-fluoroadenosine
  modified_base 17: mod_base = OTHER; note = 2'-O-methyladenosine
  modified_base 18: mod_base = OTHER; note = 2'-fluoroguanosine
  modified_base 19: mod_base = OTHER; note = 2'-O-methyladenosine
  modified_base 20: mod_base = OTHER; note = 2'-fluorouridine
  modified_base 20^21: mod_base = OTHER; note = phosphorothioate linkage
  modified_base 21: mod_base = gm
  source 1..21: mol_type = other RNA
atcttgtcctcatcaaagatg

SEQ ID NO: 1181 - RNA, 21 nt, synthetic construct
  modified_base 1: mod_base = um
  modified_base 1^2: mod_base = OTHER; note = phosphorothioate linkage
  modified_base 2: mod_base = OTHER; note = 2'-fluorocytidine
  modified_base 2^3: mod_base = OTHER; note = phosphorothioate linkage
  modified_base 3: mod_base = OTHER; note = 2'-O-methyladenosine
  modified_base 3^4: mod_base = OTHER; note = phosphorothioate linkage
  modified_base 4: mod_base = OTHER; note = 2'-fluorouridine
  modified_base 5: mod_base = cm
  modified_base 6: mod_base = OTHER; note = 2'-fluorouridine
  modified_base 7: mod_base = um
  modified_base 8: mod_base = OTHER; note = 2'-fluoroguanosine
  modified_base 9: mod_base = um
  modified_base 10: mod_base = OTHER; note = 2'-fluorocytidine
  modified_base 11: mod_base = cm
  modified_base 12: mod_base = OTHER; note = 2'-fluorouridine
  modified_base 13: mod_base = cm
  modified_base 14: mod_base = OTHER; note = 2'-fluoroadenosine
  modified_base 15: mod_base = um
  modified_base 16: mod_base = OTHER; note = 2'-fluorocytidine
  modified_base 17: mod_base = OTHER; note = 2'-O-methyladenosine
  modified_base 18: mod_base = OTHER; note = 2'-fluoroadenosine
  modified_base 19: mod_base = OTHER; note = 2'-O-methyladenosine
  modified_base 20: mod_base = OTHER; note = 2'-fluoroguanosine
  modified_base 20^21: mod_base = OTHER; note = phosphorothioate linkage
  modified_base 21: mod_base = cm
  source 1..21: mol_type = other RNA
tcatcttgtcctcatcaaagc

SEQ ID NO: 1182 - RNA, 21 nt, synthetic construct
  modified_base 1: mod_base = um
  modified_base 1^2: mod_base = OTHER; note = phosphorothioate linkage
  modified_base 2: mod_base = OTHER; note = 2'-fluorocytidine
  modified_base 2^3: mod_base = OTHER; note = phosphorothioate linkage
  modified_base 3: mod_base = um
  modified_base 3^4: mod_base = OTHER; note = phosphorothioate linkage
  modified_base 4: mod_base = OTHER; note = 2'-fluoroadenosine
  modified_base 5: mod_base = gm
  modified_base 6: mod_base = OTHER; note = 2'-fluorouridine
  modified_base 7: mod_base = um
  modified_base 8: mod_base = OTHER; note = 2'-fluoroguanosine
  modified_base 9: mod_base = um
  modified_base 10: mod_base = OTHER; note = 2'-fluoroadenosine
  modified_base 11: mod_base = gm
  modified_base 12: mod_base = OTHER; note = 2'-fluoroguanosine
  modified_base 13: mod_base = OTHER; note = 2'-O-methyladenosine
  modified_base 14: mod_base = OTHER; note = 2'-fluoroguanosine
  modified_base 15: mod_base = cm
  modified_base 16: mod_base = OTHER; note = 2'-fluoroadenosine
  modified_base 17: mod_base = gm
  modified_base 18: mod_base = OTHER; note = 2'-fluoroadenosine
  modified_base 19: mod_base = gm
  modified_base 20: mod_base = OTHER; note = 2'-fluoroadenosine
  modified_base 20^21: mod_base = OTHER; note = phosphorothioate linkage
  modified_base 21: mod_base = cm
  source 1..21: mol_type = other RNA
tctagttgtaggagcagagac

SEQ ID NO: 1183 - RNA, 21 nt, synthetic construct
  modified_base 1: mod_base = um
  modified_base 1^2: mod_base = OTHER; note = phosphorothioate linkage
  modified_base 2: mod_base = OTHER; note = 2'-fluoroadenosine
  modified_base 2^3: mod_base = OTHER; note = phosphorothioate linkage
  modified_base 3: mod_base = gm
  modified_base 3^4: mod_base = OTHER; note = phosphorothioate linkage
  modified_base 4: mod_base = OTHER; note = 2'-fluorouridine
  modified_base 5: mod_base = um
  modified_base 6: mod_base = OTHER; note = 2'-fluoroguanosine
  modified_base 7: mod_base = um
  modified_base 8: mod_base = OTHER; note = 2'-fluoroadenosine
  modified_base 9: mod_base = gm
  modified_base 10: mod_base = OTHER; note = 2'-fluoroadenosine
  modified_base 11: mod_base = OTHER; note = 2'-O-methyladenosine
  modified_base 12: mod_base = OTHER; note = 2'-fluoroguanosine
  modified_base 13: mod_base = cm
  modified_base 14: mod_base = OTHER; note = 2'-fluoroadenosine
  modified_base 15: mod_base = gm
  modified_base 16: mod_base = OTHER; note = 2'-fluoroadenosine
  modified_base 17: mod_base = gm
  modified_base 18: mod_base = OTHER; note = 2'-fluoroguanosine
  modified_base 19: mod_base = um
  modified_base 20: mod_base = OTHER; note = 2'-fluorouridine
  modified_base 20^21: mod_base = OTHER; note = phosphorothioate linkage
  modified_base 21: mod_base = gm
  source 1..21: mol_type = other RNA
tagttgtagaagcagaggttg

SEQ ID NO: 1184 - RNA, 21 nt, synthetic construct
  modified_base 1: mod_base = um
  modified_base 1^2: mod_base = OTHER; note = phosphorothioate linkage
  modified_base 2: mod_base = OTHER; note = 2'-fluoroadenosine
  modified_base 2^3: mod_base = OTHER; note = phosphorothioate linkage
  modified_base 3: mod_base = gm
  modified_base 3^4: mod_base = OTHER; note = phosphorothioate linkage
  modified_base 4: mod_base = OTHER; note = 2'-fluoroadenosine
  modified_base 5: mod_base = OTHER; note = 2'-O-methyladenosine
  modified_base 6: mod_base = OTHER; note = 2'-fluoroguanosine
  modified_base 7: mod_base = um
  modified_base 8: mod_base = OTHER; note = 2'-fluorouridine
  modified_base 9: mod_base = gm
  modified_base 10: mod_base = OTHER; note = 2'-fluorouridine
  modified_base 11: mod_base = gm
  modified_base 12: mod_base = OTHER; note = 2'-fluorocytidine
  modified_base 13: mod_base = um
  modified_base 14: mod_base = OTHER; note = 2'-fluoroguanosine
  modified_base 15: mod_base = gm
  modified_base 16: mod_base = OTHER; note = 2'-fluorouridine
  modified_base 17: mod_base = um
  modified_base 18: mod_base = OTHER; note = 2'-fluoroadenosine
  modified_base 19: mod_base = um
  modified_base 20: mod_base = OTHER; note = 2'-fluoroadenosine
  modified_base 20^21: mod_base = OTHER; note = phosphorothioate linkage
  modified_base 21: mod_base = gm
  source 1..21: mol_type = other RNA
tagaagttgtgctggttatag

SEQ ID NO: 1185 - RNA, 21 nt, synthetic construct
  modified_base 1: mod_base = um
  modified_base 1^2: mod_base = OTHER; note = phosphorothioate linkage
  modified_base 2: mod_base = OTHER; note = 2'-fluorouridine
  modified_base 2^3: mod_base = OTHER; note = phosphorothioate linkage
  modified_base 3: mod_base = gm
  modified_base 3^4: mod_base = OTHER; note = phosphorothioate linkage
  modified_base 4: mod_base = um
  modified_base 5: mod_base = OTHER; note = 2'-O-methyladenosine
  modified_base 6: mod_base = gm
  modified_base 7: mod_base = um
  modified_base 8: mod_base = OTHER; note = 2'-O-methyladenosine
  modified_base 9: mod_base = gm
  modified_base 10: mod_base = um
  modified_base 11: mod_base = cm
  modified_base 12: mod_base = OTHER; note = 2'-fluoroguanosine
  modified_base 13: mod_base = cm
  modified_base 14: mod_base = OTHER; note = 2'-fluoroadenosine
  modified_base 15: mod_base = gm
  modified_base 16: mod_base = OTHER; note = 2'-fluoroadenosine
  modified_base 17: mod_base = OTHER; note = 2'-O-methyladenosine
  modified_base 18: mod_base = cm
  modified_base 19: mod_base = OTHER; note = 2'-O-methyladenosine
  modified_base 20: mod_base = gm
  modified_base 20^21: mod_base = OTHER; note = phosphorothioate linkage
  modified_base 21: mod_base = cm
  source 1..21: mol_type = other RNA
ttgtagtagtcgcagaacagc

SEQ ID NO: 1186 - RNA, 21 nt, synthetic construct
  modified_base 1: mod_base = um
  modified_base 1^2: mod_base = OTHER; note = phosphorothioate linkage
  modified_base 2: mod_base = OTHER; note = 2'-fluorouridine
  modified_base 2^3: mod_base = OTHER; note = phosphorothioate linkage
  modified_base 3: mod_base = gm
  modified_base 3^4: mod_base = OTHER; note = phosphorothioate linkage
  modified_base 4: mod_base = um
  modified_base 5: mod_base = OTHER; note = 2'-O-methyladenosine
  modified_base 6: mod_base = gm
  modified_base 7: mod_base = OTHER; note = 2',3'-seco-uridine
  modified_base 8: mod_base = OTHER; note = 2'-O-methyladenosine
  modified_base 9: mod_base = gm
  modified_base 10: mod_base = um
  modified_base 11: mod_base = cm
  modified_base 12: mod_base = OTHER; note = 2'-fluoroguanosine
  modified_base 13: mod_base = cm
  modified_base 14: mod_base = OTHER; note = 2'-fluoroadenosine
  modified_base 15: mod_base = gm
  modified_base 16: mod_base = OTHER; note = 2'-fluoroadenosine
  modified_base 17: mod_base = OTHER; note = 2'-O-methyladenosine
  modified_base 18: mod_base = cm
  modified_base 19: mod_base = OTHER; note = 2'-O-methyladenosine
  modified_base 20: mod_base = gm
  modified_base 20^21: mod_base = OTHER; note = phosphorothioate linkage
  modified_base 21: mod_base = cm
  source 1..21: mol_type = other RNA
ttgtagtagtcgcagaacagc

SEQ ID NO: 1187 - RNA, 21 nt, synthetic construct
  modified_base 1: mod_base = um
  modified_base 1^2: mod_base = OTHER; note = phosphorothioate linkage
  modified_base 2: mod_base = OTHER; note = 2'-fluorouridine
  modified_base 2^3: mod_base = OTHER; note = phosphorothioate linkage
  modified_base 3: mod_base = cm
  modified_base 3^4: mod_base = OTHER; note = phosphorothioate linkage
  modified_base 4: mod_base = um
  modified_base 5: mod_base = um
  modified_base 6: mod_base = gm
  modified_base 7: mod_base = um
  modified_base 8: mod_base = um
  modified_base 9: mod_base = cm
  modified_base 10: mod_base = OTHER; note = 2'-O-methyladenosine
  modified_base 11: mod_base = gm
  modified_base 12: mod_base = OTHER; note = 2'-fluoroguanosine
  modified_base 13: mod_base = cm
  modified_base 14: mod_base = OTHER; note = 2'-fluoroadenosine
  modified_base 15: mod_base = OTHER; note = 2'-O-methyladenosine
  modified_base 16: mod_base = OTHER; note = 2'-fluoroadenosine
  modified_base 17: mod_base = um
  modified_base 18: mod_base = cm
  modified_base 19: mod_base = OTHER; note = 2'-O-methyladenosine
  modified_base 20: mod_base = gm
  modified_base 20^21: mod_base = OTHER; note = phosphorothioate linkage
  modified_base 21: mod_base = gm
  source 1..21: mol_type = other RNA
ttcttgttcaggcaaatcagg

SEQ ID NO: 1188 - RNA, 21 nt, synthetic construct
  modified_base 1: mod_base = um
  modified_base 1^2: mod_base = OTHER; note = phosphorothioate linkage
  modified_base 2: mod_base = OTHER; note = 2'-fluorouridine
  modified_base 2^3: mod_base = OTHER; note = phosphorothioate linkage
  modified_base 3: mod_base = cm
  modified_base 3^4: mod_base = OTHER; note = phosphorothioate linkage
  modified_base 4: mod_base = um
  modified_base 5: mod_base = um
  modified_base 6: mod_base = OTHER; note = 2'-fluoroguanosine
  modified_base 7: mod_base = um
  modified_base 8: mod_base = um
  modified_base 9: mod_base = cm
  modified_base 10: mod_base = OTHER; note = 2'-O-methyladenosine
  modified_base 11: mod_base = gm
  modified_base 12: mod_base = OTHER; note = 2'-fluoroguanosine
  modified_base 13: mod_base = cm
  modified_base 14: mod_base = OTHER; note = 2'-fluoroadenosine
  modified_base 15: mod_base = OTHER; note = 2'-O-methyladenosine
  modified_base 16: mod_base = OTHER; note = 2'-fluoroadenosine
  modified_base 17: mod_base = um
  modified_base 18: mod_base = cm
  modified_base 19: mod_base = OTHER; note = 2'-O-methyladenosine
  modified_base 20: mod_base = gm
  modified_base 20^21: mod_base = OTHER; note = phosphorothioate linkage
  modified_base 21: mod_base = cm
  source 1..21: mol_type = other RNA
ttcttgttcaggcaaatcagc

SEQ ID NO: 1189 - RNA, 21 nt, synthetic construct
  modified_base 1: mod_base = um
  modified_base 1^2: mod_base = OTHER; note = phosphorothioate linkage
  modified_base 2: mod_base = OTHER; note = 2'-fluorouridine
  modified_base 2^3: mod_base = OTHER; note = phosphorothioate linkage
  modified_base 3: mod_base = cm
  modified_base 3^4: mod_base = OTHER; note = phosphorothioate linkage
  modified_base 4: mod_base = OTHER; note = 2'-fluorouridine
  modified_base 5: mod_base = um
  modified_base 6: mod_base = gm
  modified_base 7: mod_base = um
  modified_base 8: mod_base = um
  modified_base 9: mod_base = cm
  modified_base 10: mod_base = OTHER; note = 2'-O-methyladenosine
  modified_base 11: mod_base = gm
  modified_base 12: mod_base = OTHER; note = 2'-fluoroguanosine
  modified_base 13: mod_base = cm
  modified_base 14: mod_base = OTHER; note = 2'-fluoroadenosine
  modified_base 15: mod_base = OTHER; note = 2'-O-methyladenosine
  modified_base 16: mod_base = OTHER; note = 2'-fluoroadenosine
  modified_base 17: mod_base = um
  modified_base 18: mod_base = cm
  modified_base 19: mod_base = OTHER; note = 2'-O-methyladenosine
  modified_base 20: mod_base = gm
  modified_base 20^21: mod_base = OTHER; note = phosphorothioate linkage
  modified_base 21: mod_base = cm
  source 1..21: mol_type = other RNA
ttcttgttcaggcaaatcagc

SEQ ID NO: 1190 - RNA, 24 nt, synthetic construct
  modified_base 1: mod_base = um
  modified_base 1^2: mod_base = OTHER; note = phosphorothioate linkage
  modified_base 2: mod_base = OTHER; note = 2'-fluorouridine
  modified_base 2^3: mod_base = OTHER; note = phosphorothioate linkage
  modified_base 3: mod_base = cm
  modified_base 3^4: mod_base = OTHER; note = phosphorothioate linkage
  modified_base 4: mod_base = um
  modified_base 5: mod_base = um
  modified_base 6: mod_base = gm
  modified_base 7: mod_base = um
  modified_base 8: mod_base = OTHER; note = 2',3'-seco-uridine
  modified_base 9: mod_base = cm
  modified_base 10: mod_base = OTHER; note = 2'-O-methyladenosine
  modified_base 11: mod_base = gm
  modified_base 12: mod_base = OTHER; note = 2'-fluoroguanosine
  modified_base 13: mod_base = cm
  modified_base 14: mod_base = OTHER; note = 2'-fluoroadenosine
  modified_base 15: mod_base = OTHER; note = 2'-O-methyladenosine
  modified_base 16: mod_base = OTHER; note = 2'-fluoroadenosine
  modified_base 17: mod_base = um
  modified_base 18: mod_base = cm
  modified_base 19: mod_base = OTHER; note = 2'-O-methyladenosine
  modified_base 20: mod_base = gm
  modified_base 20^21: mod_base = OTHER; note = phosphorothioate linkage
  modified_base 21: mod_base = cm
  source 1..24: mol_type = other RNA
ttcttgtttnacaggcaaatcagc

SEQ ID NO: 1191 - RNA, 21 nt, synthetic construct
  modified_base 1: mod_base = OTHER; note = 5'-cyclopropyl phosphonate-2'-O-methyluridine
  modified_base 2: mod_base = OTHER; note = 2'-fluorouridine
  modified_base 3: mod_base = cm
  modified_base 4: mod_base = um
  modified_base 5: mod_base = um
  modified_base 6: mod_base = gm
  modified_base 7: mod_base = um
  modified_base 8: mod_base = um
  modified_base 9: mod_base = cm
  modified_base 10: mod_base = OTHER; note = 2'-O-methyladenosine
  modified_base 11: mod_base = gm
  modified_base 12: mod_base = OTHER; note = 2'-fluoroguanosine
  modified_base 13: mod_base = cm
  modified_base 14: mod_base = OTHER; note = 2'-fluoroadenosine
  modified_base 15: mod_base = OTHER; note = 2'-O-methyladenosine
  modified_base 16: mod_base = OTHER; note = 2'-fluoroadenosine
  modified_base 17: mod_base = um
  modified_base 18: mod_base = cm
  modified_base 19: mod_base = OTHER; note = 2'-O-methyladenosine
  modified_base 20: mod_base = gm
  modified_base 20^21: mod_base = OTHER; note = phosphorothioate linkage
  modified_base 21: mod_base = cm
  source 1..21: mol_type = other RNA
ttcttgttcaggcaaatcagc

SEQ ID NO: 1192 - RNA, 21 nt, synthetic construct
  modified_base 1: mod_base = OTHER; note = 2'-O-methyladenosine
  modified_base 1^2: mod_base = OTHER; note = phosphorothioate linkage
  modified_base 2: mod_base = cm
  modified_base 3: mod_base = cm
  modified_base 4: mod_base = um
  modified_base 5: mod_base = gm
  modified_base 6: mod_base = cm
  modified_base 7: mod_base = um
  modified_base 8: mod_base = cm
  modified_base 9: mod_base = OTHER; note = 2'-fluorocytidine
  modified_base 10: mod_base = OTHER; note = 2'-fluoroadenosine
  modified_base 11: mod_base = OTHER; note = 2'-fluoroadenosine
  modified_base 12: mod_base = gm
  modified_base 13: mod_base = OTHER; note = 2'-O-methylinosine
  modified_base 14: mod_base = cm
  modified_base 15: mod_base = cm
  modified_base 16: mod_base = OTHER; note = 2'-O-methyladenosine
  modified_base 17: mod_base = um
  modified_base 18: mod_base = cm
  modified_base 19: mod_base = OTHER; note = 2'-O-methyladenosine
  modified_base 20: mod_base = OTHER; note = 2'-O-methyladenosine
  modified_base 21: mod_base = OTHER; note = 2'-O-methyladenosine
  source 1..21: mol_type = other RNA
acctgctccaagnccatcaaa

SEQ ID NO: 1193 - RNA, 21 nt, synthetic construct
  modified_base 1: mod_base = um
  modified_base 1^2: mod_base = OTHER; note = phosphorothioate linkage
  modified_base 2: mod_base = gm
  modified_base 3: mod_base = cm
  modified_base 4: mod_base = um
  modified_base 5: mod_base = cm
  modified_base 6: mod_base = cm
  modified_base 7: mod_base = OTHER; note = 2'-O-methyladenosine
  modified_base 8: mod_base = OTHER; note = 2'-O-methyladenosine
  modified_base 9: mod_base = OTHER; note = 2'-fluoroguanosine
  modified_base 10: mod_base = OTHER; note = 2'-fluoroguanosine
  modified_base 11: mod_base = OTHER; note = 2'-fluorocytidine
  modified_base 12: mod_base = cm
  modified_base 13: mod_base = OTHER; note = 2'-O-methyladenosine
  modified_base 14: mod_base = um
  modified_base 15: mod_base = cm
  modified_base 16: mod_base = OTHER; note = 2'-O-methyladenosine
  modified_base 17: mod_base = OTHER; note = 2'-O-methyladenosine
  modified_base 18: mod_base = gm
  modified_base 19: mod_base = OTHER; note = 2'-O-methyladenosine
  modified_base 20: mod_base = um
  modified_base 21: mod_base = um
  source 1..21: mol_type = other RNA
tgctccaaggccatcaagatt

SEQ ID NO: 1194 - RNA, 21 nt, synthetic construct
  modified_base 1: mod_base = OTHER; note = 2'-O-methyladenosine
  modified_base 1^2: mod_base = OTHER; note = phosphorothioate linkage
  modified_base 2: mod_base = OTHER; note = 2'-O-methyladenosine
  modified_base 3: mod_base = cm
  modified_base 4: mod_base = cm
  modified_base 5: mod_base = um
  modified_base 6: mod_base = cm
  modified_base 7: mod_base = OTHER; note = 2'-O-methyladenosine
  modified_base 8: mod_base = gm
  modified_base 9: mod_base = OTHER; note = 2'-fluorocytidine
  modified_base 10: mod_base = OTHER; note = 2'-fluorouridine
  modified_base 11: mod_base = OTHER; note = 2'-fluorocytidine
  modified_base 12: mod_base = cm
  modified_base 13: mod_base = gm
  modified_base 14: mod_base = OTHER; note = 2'-O-methyladenosine
  modified_base 15: mod_base = gm
  modified_base 16: mod_base = um
  modified_base 17: mod_base = um
  modified_base 18: mod_base = cm
  modified_base 19: mod_base = OTHER; note = 2'-O-methyladenosine
  modified_base 20: mod_base = OTHER; note = 2'-O-methyladenosine
  modified_base 21: mod_base = OTHER; note = 2'-O-methyladenosine
  source 1..21: mol_type = other RNA
aacctcagctccgagttcaaa

SEQ ID NO: 1195 - RNA, 21 nt, synthetic construct
  modified_base 1: mod_base = cm
  modified_base 1^2: mod_base = OTHER; note = phosphorothioate linkage
  modified_base 2: mod_base = cm
  modified_base 3: mod_base = cm
  modified_base 4: mod_base = OTHER; note = 2'-O-methyladenosine
  modified_base 5: mod_base = gm
  modified_base 6: mod_base = OTHER; note = 2'-O-methyladenosine
  modified_base 7: mod_base = OTHER; note = 2'-O-methyladenosine
  modified_base 8: mod_base = gm
  modified_base 9: mod_base = OTHER; note = 2'-fluorocytidine
  modified_base 10: mod_base = OTHER; note = 2'-fluoroadenosine
  modified_base 11: mod_base = OTHER; note = 2'-fluoroguanosine
  modified_base 12: mod_base = um
  modified_base 13: mod_base = gm
  modified_base 14: mod_base = cm
  modified_base 15: mod_base = OTHER; note = 2'-O-methyladenosine
  modified_base 16: mod_base = OTHER; note = 2'-O-methylinosine
  modified_base 17: mod_base = cm
  modified_base 18: mod_base = OTHER; note = 2'-O-methyladenosine
  modified_base 19: mod_base = um
  modified_base 20: mod_base = cm
  modified_base 21: mod_base = OTHER; note = 2'-O-methyladenosine
  source 1..21: mol_type = other RNA
cccagaagcagtgcancatca

SEQ ID NO: 1196 - RNA, 21 nt, synthetic construct
  modified_base 1: mod_base = um
  modified_base 1^2: mod_base = OTHER; note = phosphorothioate linkage
  modified_base 2: mod_base = gm
  modified_base 3: mod_base = cm
  modified_base 4: mod_base = cm
  modified_base 5: mod_base = cm
  modified_base 6: mod_base = um
  modified_base 7: mod_base = cm
  modified_base 8: mod_base = um
  modified_base 9: mod_base = OTHER; note = 2'-fluoroguanosine
  modified_base 10: mod_base = OTHER; note = 2'-fluorouridine
  modified_base 11: mod_base = OTHER; note = 2'-fluorouridine
  modified_base 12: mod_base = cm
  modified_base 13: mod_base = um
  modified_base 14: mod_base = gm
  modified_base 15: mod_base = cm
  modified_base 16: mod_base = OTHER; note = 2'-O-methylinosine
  modified_base 17: mod_base = OTHER; note = 2'-O-methyladenosine
  modified_base 18: mod_base = cm
  modified_base 19: mod_base = um
  modified_base 20: mod_base = OTHER; note = 2'-O-methyladenosine
  modified_base 21: mod_base = OTHER; note = 2'-O-methyladenosine
  source 1..21: mol_type = other RNA
tgccctctgttctgcnactaa

SEQ ID NO: 1197 - RNA, 21 nt, synthetic construct
  modified_base 1: mod_base = gm
  modified_base 1^2: mod_base = OTHER; note = phosphorothioate linkage
  modified_base 2: mod_base = cm
  modified_base 3: mod_base = cm
  modified_base 4: mod_base = cm
  modified_base 5: mod_base = um
  modified_base 6: mod_base = cm
  modified_base 7: mod_base = um
  modified_base 8: mod_base = gm
  modified_base 9: mod_base = OTHER; note = 2'-fluorouridine
  modified_base 10: mod_base = OTHER; note = 2'-fluorouridine
  modified_base 11: mod_base = OTHER; note = 2'-fluorocytidine
  modified_base 12: mod_base = um
  modified_base 13: mod_base = OTHER; note = 2'-O-methylinosine
  modified_base 14: mod_base = cm
  modified_base 15: mod_base = gm
  modified_base 16: mod_base = OTHER; note = 2'-O-methyladenosine
  modified_base 17: mod_base = cm
  modified_base 18: mod_base = um
  modified_base 19: mod_base = OTHER; note = 2'-O-methyladenosine
  modified_base 20: mod_base = cm
  modified_base 21: mod_base = um
  source 1..21: mol_type = other RNA
gccctctgttctncgactact

SEQ ID NO: 1198 - RNA, 21 nt, synthetic construct
  modified_base 1: mod_base = cm
  modified_base 1^2: mod_base = OTHER; note = phosphorothioate linkage
  modified_base 2: mod_base = cm
  modified_base 3: mod_base = um
  modified_base 4: mod_base = cm
  modified_base 5: mod_base = um
  modified_base 6: mod_base = gm
  modified_base 7: mod_base = um
  modified_base 8: mod_base = um
  modified_base 9: mod_base = OTHER; note = 2'-fluorocytidine
  modified_base 10: mod_base = OTHER; note = 2'-fluorouridine
  modified_base 11: mod_base = OTHER; note = 2'-fluoroguanosine
  modified_base 12: mod_base = cm
  modified_base 13: mod_base = gm
  modified_base 14: mod_base = OTHER; note = 2'-O-methyladenosine
  modified_base 15: mod_base = cm
  modified_base 16: mod_base = um
  modified_base 17: mod_base = OTHER; note = 2'-O-methyladenosine
  modified_base 18: mod_base = cm
  modified_base 19: mod_base = um
  modified_base 20: mod_base = OTHER; note = 2'-O-methyladenosine
  modified_base 21: mod_base = OTHER; note = 2'-O-methyladenosine
  source 1..21: mol_type = other RNA
cctctgttctgcgactactaa

SEQ ID NO: 1199 - RNA, 21 nt, synthetic construct
  modified_base 1: mod_base = cm
  modified_base 1^2: mod_base = OTHER; note = phosphorothioate linkage
  modified_base 2: mod_base = um
  modified_base 3: mod_base = cm
  modified_base 4: mod_base = um
  modified_base 5: mod_base = gm
  modified_base 6: mod_base = um
  modified_base 7: mod_base = um
  modified_base 8: mod_base = cm
  modified_base 9: mod_base = OTHER; note = 2'-fluorouridine
  modified_base 10: mod_base = OTHER; note = 2'-fluoroguanosine
  modified_base 11: mod_base = OTHER; note = 2'-fluorocytidine
  modified_base 12: mod_base = gm
  modified_base 13: mod_base = OTHER; note = 2'-O-methyladenosine
  modified_base 14: mod_base = cm
  modified_base 15: mod_base = um
  modified_base 16: mod_base = OTHER; note = 2'-O-methyladenosine
  modified_base 17: mod_base = cm
  modified_base 18: mod_base = um
  modified_base 19: mod_base = OTHER; note = 2'-O-methyladenosine
  modified_base 20: mod_base = cm
  modified_base 21: mod_base = OTHER; note = 2'-O-methyladenosine
  source 1..21: mol_type = other RNA
ctctgttctgcgactactaca

SEQ ID NO: 1200 - RNA, 21 nt, synthetic construct
  modified_base 1: mod_base = gm
  modified_base 1^2: mod_base = OTHER; note = phosphorothioate linkage
  modified_base 2: mod_base = cm
  modified_base 3: mod_base = um
  modified_base 4: mod_base = gm
  modified_base 5: mod_base = um
  modified_base 6: mod_base = um
  modified_base 7: mod_base = cm
  modified_base 8: mod_base = um
  modified_base 9: mod_base = OTHER; note = 2'-fluoroguanosine
  modified_base 10: mod_base = OTHER; note = 2'-fluorocytidine
  modified_base 11: mod_base = OTHER; note = 2'-fluoroguanosine
  modified_base 12: mod_base = OTHER; note = 2'-O-methyladenosine
  modified_base 13: mod_base = cm
  modified_base 14: mod_base = um
  modified_base 15: mod_base = OTHER; note = 2'-O-methyladenosine
  modified_base 16: mod_base = cm
  modified_base 17: mod_base = um
  modified_base 18: mod_base = OTHER; note = 2'-O-methyladenosine
  modified_base 19: mod_base = cm
  modified_base 20: mod_base = OTHER; note = 2'-O-methyladenosine
  modified_base 21: mod_base = OTHER; note = 2'-O-methyladenosine
  source 1..21: mol_type = other RNA
gctgttctgcgactactacaa

SEQ ID NO: 1201 - RNA, 21 nt, synthetic construct
  modified_base 1: mod_base = cm
  modified_base 1^2: mod_base = OTHER; note = phosphorothioate linkage
  modified_base 2: mod_base = cm
  modified_base 3: mod_base = OTHER; note = 2'-O-methyladenosine
  modified_base 4: mod_base = cm
  modified_base 5: mod_base = cm
  modified_base 6: mod_base = cm
  modified_base 7: mod_base = OTHER; note = 2'-O-methyladenosine
  modified_base 8: mod_base = um
  modified_base 9: mod_base = OTHER; note = 2'-fluorocytidine
  modified_base 10: mod_base = OTHER; note = 2'-fluorouridine
  modified_base 11: mod_base = OTHER; note = 2'-fluoroguanosine
  modified_base 12: mod_base = cm
  modified_base 13: mod_base = um
  modified_base 14: mod_base = OTHER; note = 2'-O-methyladenosine
  modified_base 15: mod_base = cm
  modified_base 16: mod_base = OTHER; note = 2'-O-methyladenosine
  modified_base 17: mod_base = OTHER; note = 2'-O-methyladenosine
  modified_base 18: mod_base = cm
  modified_base 19: mod_base = um
  modified_base 20: mod_base = OTHER; note = 2'-O-methyladenosine
  modified_base 21: mod_base = um
  source 1..21: mol_type = other RNA
ccacccatctgctacaactat

SEQ ID NO: 1202 - RNA, 21 nt, synthetic construct
  modified_base 1: mod_base = gm
  modified_base 1^2: mod_base = OTHER; note = phosphorothioate linkage
  modified_base 2: mod_base = cm
  modified_base 3: mod_base = OTHER; note = 2'-O-methyladenosine
  modified_base 4: mod_base = OTHER; note = 2'-O-methyladenosine
  modified_base 5: mod_base = OTHER; note = 2'-O-methyladenosine
  modified_base 6: mod_base = gm
  modified_base 7: mod_base = um
  modified_base 8: mod_base = gm
  modified_base 9: mod_base = OTHER; note = 2'-fluoroguanosine
  modified_base 10: mod_base = OTHER; note = 2'-fluorouridine
  modified_base 11: mod_base = OTHER; note = 2'-fluorouridine
  modified_base 12: mod_base = cm
  modified_base 13: mod_base = gm
  modified_base 14: mod_base = OTHER; note = 2'-O-methyladenosine
  modified_base 15: mod_base = cm
  modified_base 16: mod_base = OTHER; note = 2'-O-methylinosine
  modified_base 17: mod_base = um
  modified_base 18: mod_base = gm
  modified_base 19: mod_base = gm
  modified_base 20: mod_base = OTHER; note = 2'-O-methyladenosine
  modified_base 21: mod_base = OTHER; note = 2'-O-methyladenosine
  source 1..21: mol_type = other RNA
gcaaagtggttcgacntggaa

SEQ ID NO: 1203 - RNA, 21 nt, synthetic construct
  modified_base 1: mod_base = gm
  modified_base 1^2: mod_base = OTHER; note = phosphorothioate linkage
  modified_base 2: mod_base = OTHER; note = 2'-O-methyladenosine
  modified_base 3: mod_base = gm
  modified_base 4: mod_base = um
  modified_base 5: mod_base = gm
  modified_base 6: mod_base = gm
  modified_base 7: mod_base = um
  modified_base 8: mod_base = um
  modified_base 9: mod_base = OTHER; note = 2'-fluorocytidine
  modified_base 10: mod_base = OTHER; note = 2'-fluoroguanosine
  modified_base 11: mod_base = OTHER; note = 2'-fluoroadenosine
  modified_base 12: mod_base = cm
  modified_base 13: mod_base = gm
  modified_base 14: mod_base = um
  modified_base 15: mod_base = gm
  modified_base 16: mod_base = OTHER; note = 2'-O-methylinosine
  modified_base 17: mod_base = OTHER; note = 2'-O-methyladenosine
  modified_base 18: mod_base = cm
  modified_base 19: mod_base = um
  modified_base 20: mod_base = um
  modified_base 21: mod_base = OTHER; note = 2'-O-methyladenosine
  source 1..21: mol_type = other RNA
gagtggttcgacgtgnactta

SEQ ID NO: 1204 - RNA, 21 nt, synthetic construct
  modified_base 1: mod_base = gm
  modified_base 1^2: mod_base = OTHER; note = phosphorothioate linkage
  modified_base 2: mod_base = um
  modified_base 3: mod_base = gm
  modified_base 4: mod_base = gm
  modified_base 5: mod_base = um
  modified_base 6: mod_base = um
  modified_base 7: mod_base = cm
  modified_base 8: mod_base = gm
  modified_base 9: mod_base = OTHER; note = 2'-fluoroadenosine
  modified_base 10: mod_base = OTHER; note = 2'-fluorocytidine
  modified_base 11: mod_base = OTHER; note = 2'-fluoroguanosine
  modified_base 12: mod_base = um
  modified_base 13: mod_base = gm
  modified_base 14: mod_base = OTHER; note = 2'-O-methylinosine
  modified_base 15: mod_base = OTHER; note = 2'-O-methyladenosine
  modified_base 16: mod_base = cm
  modified_base 17: mod_base = um
  modified_base 18: mod_base = um
  modified_base 19: mod_base = cm
  modified_base 20: mod_base = cm
  modified_base 21: mod_base = OTHER; note = 2'-O-methyladenosine
  source 1..21: mol_type = other RNA
gtggttcgacgtgnacttcca

SEQ ID NO: 1205 - RNA, 21 nt, synthetic construct
  modified_base 1: mod_base = gm
  modified_base 1^2: mod_base = OTHER; note = phosphorothioate linkage
  modified_base 2: mod_base = um
  modified_base 3: mod_base = gm
  modified_base 4: mod_base = gm
  modified_base 5: mod_base = um
  modified_base 6: mod_base = um
  modified_base 7: mod_base = cm
  modified_base 8: mod_base = gm
  modified_base 9: mod_base = OTHER; note = 2'-fluoroadenosine
  modified_base 10: mod_base = OTHER; note = 2'-fluorocytidine
  modified_base 11: mod_base = OTHER; note = 2'-fluoroguanosine
  modified_base 12: mod_base = um
  modified_base 13: mod_base = gm
  modified_base 14: mod_base = gm
  modified_base 15: mod_base = OTHER; note = 2'-O-methyladenosine
  modified_base 16: mod_base = cm
  modified_base 17: mod_base = um
  modified_base 18: mod_base = um
  modified_base 19: mod_base = cm
  modified_base 20: mod_base = cm
  modified_base 21: mod_base = OTHER; note = 2'-O-methyladenosine
  source 1..21: mol_type = other RNA
gtggttcgacgtggacttcca

SEQ ID NO: 1206 - RNA, 21 nt, synthetic construct
  modified_base 1: mod_base = cm
  modified_base 1^2: mod_base = OTHER; note = phosphorothioate linkage
  modified_base 2: mod_base = OTHER; note = 2'-O-methyladenosine
  modified_base 3: mod_base = gm
  modified_base 4: mod_base = cm
  modified_base 5: mod_base = um
  modified_base 6: mod_base = um
  modified_base 7: mod_base = cm
  modified_base 8: mod_base = cm
  modified_base 9: mod_base = OTHER; note = 2'-fluoroadenosine
  modified_base 10: mod_base = OTHER; note = 2'-fluorocytidine
  modified_base 11: mod_base = OTHER; note = 2'-fluorouridine
  modified_base 12: mod_base = OTHER; note = 2'-O-methyladenosine
  modified_base 13: mod_base = cm
  modified_base 14: mod_base = OTHER; note = 2'-O-methyladenosine
  modified_base 15: mod_base = OTHER; note = 2'-O-methyladenosine
  modified_base 16: mod_base = OTHER; note = 2'-O-methylinosine
  modified_base 17: mod_base = OTHER; note = 2'-O-methyladenosine
  modified_base 18: mod_base = cm
  modified_base 19: mod_base = cm
  modified_base 20: mod_base = um
  modified_base 21: mod_base = um
  source 1..21: mol_type = other RNA
cagcttccactacaanacctt

SEQ ID NO: 1207 - RNA, 21 nt, synthetic construct
  modified_base 1: mod_base = cm
  modified_base 1^2: mod_base = OTHER; note = phosphorothioate linkage
  modified_base 2: mod_base = OTHER; note = 2'-O-methyladenosine
  modified_base 3: mod_base = gm
  modified_base 4: mod_base = cm
  modified_base 5: mod_base = um
  modified_base 6: mod_base = um
  modified_base 7: mod_base = cm
  modified_base 8: mod_base = cm
  modified_base 9: mod_base = OTHER; note = 2'-fluoroadenosine
  modified_base 10: mod_base = OTHER; note = 2'-fluorocytidine
  modified_base 11: mod_base = OTHER; note = 2'-fluorouridine
  modified_base 12: mod_base = OTHER; note = 2'-O-methyladenosine
  modified_base 13: mod_base = cm
  modified_base 14: mod_base = OTHER; note = 2'-O-methyladenosine
  modified_base 15: mod_base = OTHER; note = 2'-O-methyladenosine
  modified_base 16: mod_base = gm
  modified_base 17: mod_base = OTHER; note = 2'-O-methyladenosine
  modified_base 18: mod_base = cm
  modified_base 19: mod_base = cm
  modified_base 20: mod_base = um
  modified_base 21: mod_base = um
  source 1..21: mol_type = other RNA
cagcttccactacaagacctt

SEQ ID NO: 1208 - RNA, 21 nt, synthetic construct
  modified_base 1: mod_base = gm
  modified_base 1^2: mod_base = OTHER; note = phosphorothioate linkage
  modified_base 2: mod_base = OTHER; note = 2'-O-methyl-2-aminoadenosine
  modified_base 3: mod_base = OTHER; note = 2'-O-methyladenosine
  modified_base 4: mod_base = gm
  modified_base 5: mod_base = um
  modified_base 6: mod_base = OTHER; note = 2'-O-methyladenosine
  modified_base 7: mod_base = um
  modified_base 8: mod_base = gm
  modified_base 9: mod_base = OTHER; note = 2'-fluorocytidine
  modified_base 10: mod_base = OTHER; note = 2'-fluorouridine
  modified_base 11: mod_base = OTHER; note = 2'-fluorocytidine
  modified_base 12: mod_base = OTHER; note = 2'-O-methyladenosine
  modified_base 13: mod_base = gm
  modified_base 14: mod_base = cm
  modified_base 15: mod_base = OTHER; note = 2'-O-methyladenosine
  modified_base 16: mod_base = cm
  modified_base 17: mod_base = um
  modified_base 18: mod_base = gm
  modified_base 19: mod_base = OTHER; note = 2'-O-methylinosine
  modified_base 20: mod_base = um
  modified_base 21: mod_base = OTHER; note = 2'-O-methyladenosine
  source 1..21: mol_type = other RNA
gnagtatgctcagcactgnta

SEQ ID NO: 1209 - RNA, 21 nt, synthetic construct
  modified_base 1: mod_base = gm
  modified_base 1^2: mod_base = OTHER; note = phosphorothioate linkage
  modified_base 2: mod_base = OTHER; note = 2'-O-methyl-2-aminoadenosine
  modified_base 3: mod_base = OTHER; note = 2'-O-methyladenosine
  modified_base 4: mod_base = gm
  modified_base 5: mod_base = um
  modified_base 6: mod_base = OTHER; note = 2'-O-methyladenosine
  modified_base 7: mod_base = um
  modified_base 8: mod_base = gm
  modified_base 9: mod_base = OTHER; note = 2'-fluorocytidine
  modified_base 10: mod_base = OTHER; note = 2'-fluorouridine
  modified_base 11: mod_base = OTHER; note = 2'-fluorocytidine
  modified_base 12: mod_base = OTHER; note = 2'-O-methyladenosine
  modified_base 13: mod_base = gm
  modified_base 14: mod_base = um
  modified_base 15: mod_base = OTHER; note = 2'-O-methyladenosine
  modified_base 16: mod_base = cm
  modified_base 17: mod_base = um
  modified_base 18: mod_base = gm
  modified_base 19: mod_base = OTHER; note = 2'-O-methylinosine
  modified_base 20: mod_base = um
  modified_base 21: mod_base = OTHER; note = 2'-O-methyladenosine
  source 1..21: mol_type = other RNA
gnagtatgctcagtactgnta

SEQ ID NO: 1210 - RNA, 21 nt, synthetic construct
  modified_base 1: mod_base = gm
  modified_base 1^2: mod_base = OTHER; note = phosphorothioate linkage
  modified_base 2: mod_base = cm
  modified_base 3: mod_base = cm
  modified_base 4: mod_base = um
  modified_base 5: mod_base = um
  modified_base 6: mod_base = cm
  modified_base 7: mod_base = um
  modified_base 8: mod_base = um
  modified_base 9: mod_base = OTHER; note = 2'-fluorocytidine
  modified_base 10: mod_base = OTHER; note = 2'-fluoroadenosine
  modified_base 11: mod_base = OTHER; note = 2'-fluoroadenosine
  modified_base 12: mod_base = cm
  modified_base 13: mod_base = OTHER; note = 2'-O-methyladenosine
  modified_base 14: mod_base = cm
  modified_base 15: mod_base = cm
  modified_base 16: mod_base = um
  modified_base 17: mod_base = um
  modified_base 18: mod_base = cm
  modified_base 19: mod_base = OTHER; note = 2'-O-methyladenosine
  modified_base 20: mod_base = OTHER; note = 2'-O-methyladenosine
  modified_base 21: mod_base = OTHER; note = 2'-O-methyladenosine
  source 1..21: mol_type = other RNA
gccttcttcaacaccttcaaa

SEQ ID NO: 1211 - RNA, 21 nt, synthetic construct
  modified_base 1: mod_base = gm
  modified_base 1^2: mod_base = OTHER; note = phosphorothioate linkage
  modified_base 2: mod_base = cm
  modified_base 3: mod_base = cm
  modified_base 4: mod_base = um
  modified_base 5: mod_base = um
  modified_base 6: mod_base = cm
  modified_base 7: mod_base = um
  modified_base 8: mod_base = um
  modified_base 9: mod_base = OTHER; note = 2'-fluorocytidine
  modified_base 10: mod_base = OTHER; note = 2'-fluoroadenosine
  modified_base 11: mod_base = OTHER; note = 2'-fluoroadenosine
  modified_base 12: mod_base = cm
  modified_base 13: mod_base = OTHER; note = 2'-O-methyladenosine
  modified_base 14: mod_base = um
  modified_base 15: mod_base = cm
  modified_base 16: mod_base = um
  modified_base 17: mod_base = um
  modified_base 18: mod_base = cm
  modified_base 19: mod_base = OTHER; note = 2'-O-methyladenosine
  modified_base 20: mod_base = OTHER; note = 2'-O-methyladenosine
  modified_base 21: mod_base = OTHER; note = 2'-O-methyladenosine
  source 1..21: mol_type = other RNA
gccttcttcaacatcttcaaa

SEQ ID NO: 1212 - RNA, 21 nt, synthetic construct
  modified_base 1: mod_base = gm
  modified_base 1^2: mod_base = OTHER; note = phosphorothioate linkage
  modified_base 2: mod_base = cm
  modified_base 3: mod_base = cm
  modified_base 4: mod_base = um
  modified_base 5: mod_base = um
  modified_base 6: mod_base = cm
  modified_base 7: mod_base = um
  modified_base 8: mod_base = um
  modified_base 9: mod_base = OTHER; note = 2'-fluorocytidine
  modified_base 10: mod_base = OTHER; note = 2'-fluoroadenosine
  modified_base 11: mod_base = OTHER; note = 2'-fluoroadenosine
  modified_base 12: mod_base = cm
  modified_base 13: mod_base = OTHER; note = 2'-O-methyladenosine
  modified_base 14: mod_base = cm
  modified_base 15: mod_base = um
  modified_base 16: mod_base = um
  modified_base 17: mod_base = um
  modified_base 18: mod_base = cm
  modified_base 19: mod_base = OTHER; note = 2'-O-methyladenosine
  modified_base 20: mod_base = OTHER; note = 2'-O-methyladenosine
  modified_base 21: mod_base = OTHER; note = 2'-O-methyladenosine
  source 1..21: mol_type = other RNA
gccttcttcaacactttcaaa

SEQ ID NO: 1213 - RNA, 21 nt, synthetic construct
  modified_base 1: mod_base = gm
  modified_base 1^2: mod_base = OTHER; note = phosphorothioate linkage
  modified_base 2: mod_base = gm
  modified_base 3: mod_base = gm
  modified_base 4: mod_base = OTHER; note = 2'-O-methyladenosine
  modified_base 5: mod_base = cm
  modified_base 6: mod_base = OTHER; note = 2'-O-methyladenosine
  modified_base 7: mod_base = OTHER; note = 2'-O-methyladenosine
  modified_base 8: mod_base = gm
  modified_base 9: mod_base = OTHER; note = 2'-fluoroadenosine
  modified_base 10: mod_base = OTHER; note = 2'-fluoroadenosine
  modified_base 11: mod_base = OTHER; note = 2'-fluoroguanosine
  modified_base 12: mod_base = OTHER; note = 2'-O-methyladenosine
  modified_base 13: mod_base = cm
  modified_base 14: mod_base = cm
  modified_base 15: mod_base = OTHER; note = 2'-O-methyladenosine
  modified_base 16: mod_base = OTHER; note = 2'-O-methylinosine
  modified_base 17: mod_base = cm
  modified_base 18: mod_base = OTHER; note = 2'-O-methyladenosine
  modified_base 19: mod_base = um
  modified_base 20: mod_base = cm
  modified_base 21: mod_base = um
  source 1..21: mol_type = other RNA
gggacaagaagaccancatct

SEQ ID NO: 1214 - RNA, 21 nt, synthetic construct
  modified_base 1: mod_base = gm
  modified_base 1^2: mod_base = OTHER; note = phosphorothioate linkage
  modified_base 2: mod_base = gm
  modified_base 3: mod_base = OTHER; note = 2'-O-methyladenosine
  modified_base 4: mod_base = cm
  modified_base 5: mod_base = cm
  modified_base 6: mod_base = OTHER; note = 2'-O-methyladenosine
  modified_base 7: mod_base = gm
  modified_base 8: mod_base = cm
  modified_base 9: mod_base = OTHER; note = 2'-fluoroadenosine
  modified_base 10: mod_base = OTHER; note = 2'-fluorouridine
  modified_base 11: mod_base = OTHER; note = 2'-fluorocytidine
  modified_base 12: mod_base = um
  modified_base 13: mod_base = um
  modified_base 14: mod_base = cm
  modified_base 15: mod_base = OTHER; note = 2'-O-methyladenosine
  modified_base 16: mod_base = um
  modified_base 17: mod_base = cm
  modified_base 18: mod_base = OTHER; note = 2'-O-methyladenosine
  modified_base 19: mod_base = OTHER; note = 2'-O-methyladenosine
  modified_base 20: mod_base = cm
  modified_base 21: mod_base = OTHER; note = 2'-O-methyladenosine
  source 1..21: mol_type = other RNA
ggaccagcatcttcatcaaca

SEQ ID NO: 1215 - RNA, 21 nt, synthetic construct
  modified_base 1: mod_base = gm
  modified_base 1^2: mod_base = OTHER; note = phosphorothioate linkage
  modified_base 2: mod_base = cm
  modified_base 3: mod_base = um
  modified_base 4: mod_base = gm
  modified_base 5: mod_base = OTHER; note = 2'-O-methyladenosine
  modified_base 6: mod_base = um
  modified_base 7: mod_base = um
  modified_base 8: mod_base = um
  modified_base 9: mod_base = OTHER; note = 2'-fluoroguanosine
  modified_base 10: mod_base = OTHER; note = 2'-fluorocytidine
  modified_base 11: mod_base = OTHER; note = 2'-fluorocytidine
  modified_base 12: mod_base = um
  modified_base 13: mod_base = gm
  modified_base 14: mod_base = OTHER; note = 2'-O-methyladenosine
  modified_base 15: mod_base = OTHER; note = 2'-O-methyladenosine
  modified_base 16: mod_base = cm
  modified_base 17: mod_base = OTHER; note = 2'-O-methyladenosine
  modified_base 18: mod_base = OTHER; note = 2'-O-methyladenosine
  modified_base 19: mod_base = gm
  modified_base 20: mod_base = OTHER; note = 2'-O-methyladenosine
  modified_base 21: mod_base = OTHER; note = 2'-O-methyladenosine
  source 1..21: mol_type = other RNA
gctgatttgcctgaacaagaa

SEQ ID NO: 1216 - RNA, 21 nt, synthetic construct
  modified_base 1: mod_base = cm
  modified_base 1^2: mod_base = OTHER; note = phosphorothioate linkage
  modified_base 2: mod_base = OTHER; note = 2'-O-methyl-2-aminoadenosine
  modified_base 3: mod_base = OTHER; note = 2'-O-methyladenosine
  modified_base 4: mod_base = gm
  modified_base 5: mod_base = gm
  modified_base 6: mod_base = OTHER; note = 2'-O-methyladenosine
  modified_base 7: mod_base = OTHER; note = 2'-O-methyladenosine
  modified_base 8: mod_base = OTHER; note = 2'-O-methyladenosine
  modified_base 9: mod_base = OTHER; note = 2'-fluorocytidine
  modified_base 10: mod_base = OTHER; note = 2'-fluorocytidine
  modified_base 11: mod_base = OTHER; note = 2'-fluorouridine
  modified_base 12: mod_base = OTHER; note = 2'-O-methyladenosine
  modified_base 13: mod_base = cm
  modified_base 14: mod_base = OTHER; note = 2'-O-methyladenosine
  modified_base 15: mod_base = OTHER; note = 2'-O-methyladenosine
  modified_base 16: mod_base = cm
  modified_base 17: mod_base = OTHER; note = 2'-O-methyladenosine
  modified_base 18: mod_base = OTHER; note = 2'-O-methyladenosine
  modified_base 19: mod_base = cm
  modified_base 20: mod_base = OTHER; note = 2'-O-methyladenosine
  modified_base 21: mod_base = um
  source 1..21: mol_type = other RNA
cnaggaaacctacaacaacat

SEQ ID NO: 1217 - RNA, 21 nt, synthetic construct
  modified_base 1: mod_base = gm
  modified_base 1^2: mod_base = OTHER; note = phosphorothioate linkage
  modified_base 2: mod_base = gm
  modified_base 3: mod_base = OTHER; note = 2'-O-methyladenosine
  modified_base 4: mod_base = OTHER; note = 2'-O-methyladenosine
  modified_base 5: mod_base = OTHER; note = 2'-O-methyladenosine
  modified_base 6: mod_base = cm
  modified_base 7: mod_base = cm
  modified_base 8: mod_base = um
  modified_base 9: mod_base = OTHER; note = 2'-fluoroadenosine
  modified_base 10: mod_base = OTHER; note = 2'-fluorocytidine
  modified_base 11: mod_base = OTHER; note = 2'-fluoroadenosine
  modified_base 12: mod_base = OTHER; note = 2'-O-methyladenosine
  modified_base 13: mod_base = cm
  modified_base 14: mod_base = OTHER; note = 2'-O-methyladenosine
  modified_base 15: mod_base = OTHER; note = 2'-O-methyladenosine
  modified_base 16: mod_base = cm
  modified_base 17: mod_base = OTHER; note = 2'-O-methyladenosine
  modified_base 18: mod_base = um
  modified_base 19: mod_base = cm
  modified_base 20: mod_base = OTHER; note = 2'-O-methyladenosine
  modified_base 21: mod_base = um
  source 1..21: mol_type = other RNA
ggaaacctacaacaacatcat

SEQ ID NO: 1218 - RNA, 21 nt, synthetic construct
  modified_base 1: mod_base = gm
  modified_base 1^2: mod_base = OTHER; note = phosphorothioate linkage
  modified_base 2: mod_base = OTHER; note = 2'-O-methyl-2-aminoadenosine
  modified_base 3: mod_base = OTHER; note = 2'-O-methyladenosine
  modified_base 4: mod_base = gm
  modified_base 5: mod_base = OTHER; note = 2'-O-methyladenosine
  modified_base 6: mod_base = cm
  modified_base 7: mod_base = cm
  modified_base 8: mod_base = OTHER; note = 2'-O-methyladenosine
  modified_base 9: mod_base = OTHER; note = 2'-fluoroguanosine
  modified_base 10: mod_base = OTHER; note = 2'-fluorocytidine
  modified_base 11: mod_base = OTHER; note = 2'-fluoroadenosine
  modified_base 12: mod_base = um
  modified_base 13: mod_base = cm
  modified_base 14: mod_base = um
  modified_base 15: mod_base = um
  modified_base 16: mod_base = cm
  modified_base 17: mod_base = OTHER; note = 2'-O-methyladenosine
  modified_base 18: mod_base = um
  modified_base 19: mod_base = cm
  modified_base 20: mod_base = OTHER; note = 2'-O-methyladenosine
  modified_base 21: mod_base = OTHER; note = 2'-O-methyladenosine
  source 1..21: mol_type = other RNA
gnagaccagcatcttcatcaa

SEQ ID NO: 1219 - RNA, 21 nt, synthetic construct
  modified_base 1: mod_base = gm
  modified_base 1^2: mod_base = OTHER; note = phosphorothioate linkage
  modified_base 2: mod_base = cm
  modified_base 3: mod_base = um
  modified_base 4: mod_base = gm
  modified_base 5: mod_base = cm
  modified_base 6: mod_base = um
  modified_base 7: mod_base = OTHER; note = 2'-O-methyladenosine
  modified_base 8: mod_base = cm
  modified_base 9: mod_base = OTHER; note = 2'-fluoroadenosine
  modified_base 10: mod_base = OTHER; note = 2'-fluoroadenosine
  modified_base 11: mod_base = OTHER; note = 2'-fluorocytidine
  modified_base 12: mod_base = um
  modified_base 13: mod_base = OTHER; note = 2'-O-methyladenosine
  modified_base 14: mod_base = cm
  modified_base 15: mod_base = cm
  modified_base 16: mod_base = OTHER; note = 2'-O-methyladenosine
  modified_base 17: mod_base = OTHER; note = 2'-O-methylinosine
  modified_base 18: mod_base = OTHER; note = 2'-O-methyladenosine
  modified_base 19: mod_base = um
  modified_base 20: mod_base = cm
  modified_base 21: mod_base = OTHER; note = 2'-O-methyladenosine
  source 1..21: mol_type = other RNA
gctgctacaactaccanatca

SEQ ID NO: 1220 - RNA, 21 nt, synthetic construct
  modified_base 1: mod_base = gm
  modified_base 1^2: mod_base = OTHER; note = phosphorothioate linkage
  modified_base 2: mod_base = cm
  modified_base 3: mod_base = um
  modified_base 4: mod_base = OTHER; note = 2'-O-methyladenosine
  modified_base 5: mod_base = cm
  modified_base 6: mod_base = OTHER; note = 2'-O-methyladenosine
  modified_base 7: mod_base = OTHER; note = 2'-O-methyladenosine
  modified_base 8: mod_base = cm
  modified_base 9: mod_base = OTHER; note = 2'-fluorouridine
  modified_base 10: mod_base = OTHER; note = 2'-fluoroadenosine
  modified_base 11: mod_base = OTHER; note = 2'-fluorocytidine
  modified_base 12: mod_base = cm
  modified_base 13: mod_base = OTHER; note = 2'-O-methyladenosine
  modified_base 14: mod_base = gm
  modified_base 15: mod_base = OTHER; note = 2'-O-methyladenosine
  modified_base 16: mod_base = um
  modified_base 17: mod_base = cm
  modified_base 18: mod_base = OTHER; note = 2'-O-methyladenosine
  modified_base 19: mod_base = OTHER; note = 2'-O-methylinosine
  modified_base 20: mod_base = gm
  modified_base 21: mod_base = OTHER; note = 2'-O-methyladenosine
  source 1..21: mol_type = other RNA
gctacaactaccagatcanga

SEQ ID NO: 1221 - RNA, 21 nt, synthetic construct
  modified_base 1: mod_base = cm
  modified_base 1^2: mod_base = OTHER; note = phosphorothioate linkage
  modified_base 2: mod_base = cm
  modified_base 3: mod_base = cm
  modified_base 4: mod_base = OTHER; note = 2'-O-methyladenosine
  modified_base 5: mod_base = cm
  modified_base 6: mod_base = cm
  modified_base 7: mod_base = cm
  modified_base 8: mod_base = OTHER; note = 2'-O-methyladenosine
  modified_base 9: mod_base = OTHER; note = 2'-fluorouridine
  modified_base 10: mod_base = OTHER; note = 2'-fluorocytidine
  modified_base 11: mod_base = OTHER; note = 2'-fluorouridine
  modified_base 12: mod_base = gm
  modified_base 13: mod_base = cm
  modified_base 14: mod_base = um
  modified_base 15: mod_base = OTHER; note = 2'-O-methyladenosine
  modified_base 16: mod_base = cm
  modified_base 17: mod_base = OTHER; note = 2'-O-methyladenosine
  modified_base 18: mod_base = OTHER; note = 2'-O-methyladenosine
  modified_base 19: mod_base = cm
  modified_base 20: mod_base = um
  modified_base 21: mod_base = OTHER; note = 2'-O-methyladenosine
  source 1..21: mol_type = other RNA
cccacccatctgctacaacta

SEQ ID NO: 1222 - RNA, 21 nt, synthetic construct
  modified_base 1: mod_base = gm
  modified_base 1^2: mod_base = OTHER; note = phosphorothioate linkage
  modified_base 2: mod_base = OTHER; note = 2'-O-methyladenosine
  modified_base 3: mod_base = gm
  modified_base 4: mod_base = OTHER; note = 2'-O-methyladenosine
  modified_base 5: mod_base = um
  modified_base 6: mod_base = cm
  modified_base 7: mod_base = cm
  modified_base 8: mod_base = gm
  modified_base 9: mod_base = OTHER; note = 2'-fluorocytidine
  modified_base 10: mod_base = OTHER; note = 2'-fluoroadenosine
  modified_base 11: mod_base = OTHER; note = 2'-fluorouridine
  modified_base 12: mod_base = cm
  modified_base 13: mod_base = cm
  modified_base 14: mod_base = OTHER; note = 2'-O-methyladenosine
  modified_base 15: mod_base = gm
  modified_base 16: mod_base = um
  modified_base 17: mod_base = OTHER; note = 2'-O-methylinosine
  modified_base 18: mod_base = um
  modified_base 19: mod_base = um
  modified_base 20: mod_base = gm
  modified_base 21: mod_base = OTHER; note = 2'-O-methyladenosine
  source 1..21: mol_type = other RNA
gagatccgcatccagtnttga

SEQ ID NO: 1223 - RNA, 21 nt, synthetic construct
  modified_base 1: mod_base = cm
  modified_base 1^2: mod_base = OTHER; note = phosphorothioate linkage
  modified_base 2: mod_base = cm
  modified_base 3: mod_base = OTHER; note = 2'-O-methyladenosine
  modified_base 4: mod_base = gm
  modified_base 5: mod_base = OTHER; note = 2'-O-methyladenosine
  modified_base 6: mod_base = gm
  modified_base 7: mod_base = gm
  modified_base 8: mod_base = um
  modified_base 9: mod_base = OTHER; note = 2'-fluoroguanosine
  modified_base 10: mod_base = OTHER; note = 2'-fluoroadenosine
  modified_base 11: mod_base = OTHER; note = 2'-fluoroguanosine
  modified_base 12: mod_base = cm
  modified_base 13: mod_base = OTHER; note = 2'-O-methyladenosine
  modified_base 14: mod_base = um
  modified_base 15: mod_base = cm
  modified_base 16: mod_base = OTHER; note = 2'-O-methylinosine
  modified_base 17: mod_base = OTHER; note = 2'-O-methyladenosine
  modified_base 18: mod_base = OTHER; note = 2'-O-methyladenosine
  modified_base 19: mod_base = cm
  modified_base 20: mod_base = OTHER; note = 2'-O-methyladenosine
  modified_base 21: mod_base = OTHER; note = 2'-O-methyladenosine
  source 1..21: mol_type = other RNA
ccagaggtgagcatcnaacaa

SEQ ID NO: 1224 - RNA, 21 nt, synthetic construct
  modified_base 1: mod_base = cm
  modified_base 1^2: mod_base = OTHER; note = phosphorothioate linkage
  modified_base 2: mod_base = OTHER; note = 2'-O-methyladenosine
  modified_base 3: mod_base = gm
  modified_base 4: mod_base = cm
  modified_base 5: mod_base = OTHER; note = 2'-O-methyladenosine
  modified_base 6: mod_base = gm
  modified_base 7: mod_base = gm
  modified_base 8: mod_base = gm
  modified_base 9: mod_base = OTHER; note = 2'-fluoroadenosine
  modified_base 10: mod_base = OTHER; note = 2'-fluorocytidine
  modified_base 11: mod_base = OTHER; note = 2'-fluorocytidine
  modified_base 12: mod_base = cm
  modified_base 13: mod_base = um
  modified_base 14: mod_base = um
  modified_base 15: mod_base = cm
  modified_base 16: mod_base = OTHER; note = 2'-O-methyladenosine
  modified_base 17: mod_base = OTHER; note = 2'-O-methyladenosine
  modified_base 18: mod_base = gm
  modified_base 19: mod_base = OTHER; note = 2'-O-methyladenosine
  modified_base 20: mod_base = um
  modified_base 21: mod_base = OTHER; note = 2'-O-methyladenosine
  source 1..21: mol_type = other RNA
cagcagggacccttcaagata

SEQ ID NO: 1225 - RNA, 21 nt, synthetic construct
  modified_base 1: mod_base = cm
  modified_base 1^2: mod_base = OTHER; note = phosphorothioate linkage
  modified_base 2: mod_base = OTHER; note = 2'-O-methyl-2-aminoadenosine
  modified_base 3: mod_base = OTHER; note = 2'-O-methyladenosine
  modified_base 4: mod_base = gm
  modified_base 5: mod_base = OTHER; note = 2'-O-methyladenosine
  modified_base 6: mod_base = um
  modified_base 7: mod_base = gm
  modified_base 8: mod_base = um
  modified_base 9: mod_base = OTHER; note = 2'-fluoroguanosine
  modified_base 10: mod_base = OTHER; note = 2'-fluorocytidine
  modified_base 11: mod_base = OTHER; note = 2'-fluorocytidine
  modified_base 12: mod_base = um
  modified_base 13: mod_base = cm
  modified_base 14: mod_base = OTHER; note = 2'-O-methyladenosine
  modified_base 15: mod_base = OTHER; note = 2'-O-methyladenosine
  modified_base 16: mod_base = cm
  modified_base 17: mod_base = um
  modified_base 18: mod_base = OTHER; note = 2'-O-methyladenosine
  modified_base 19: mod_base = cm
  modified_base 20: mod_base = OTHER; note = 2'-O-methylinosine
  modified_base 21: mod_base = OTHER; note = 2'-O-methyladenosine
  source 1..21: mol_type = other RNA
cnagatgtgcctcaactacna

SEQ ID NO: 1226 - RNA, 21 nt, synthetic construct
  modified_base 1: mod_base = gm
  modified_base 1^2: mod_base = OTHER; note = phosphorothioate linkage
  modified_base 2: mod_base = gm
  modified_base 3: mod_base = OTHER; note = 2'-O-methyladenosine
  modified_base 4: mod_base = um
  modified_base 5: mod_base = gm
  modified_base 6: mod_base = um
  modified_base 7: mod_base = gm
  modified_base 8: mod_base = cm
  modified_base 9: mod_base = OTHER; note = 2'-fluorocytidine
  modified_base 10: mod_base = OTHER; note = 2'-fluorouridine
  modified_base 11: mod_base = OTHER; note = 2'-fluorocytidine
  modified_base 12: mod_base = OTHER; note = 2'-O-methyladenosine
  modified_base 13: mod_base = OTHER; note = 2'-O-methyladenosine
  modified_base 14: mod_base = cm
  modified_base 15: mod_base = um
  modified_base 16: mod_base = OTHER; note = 2'-O-methyladenosine
  modified_base 17: mod_base = cm
  modified_base 18: mod_base = OTHER; note = 2'-O-methylinosine
  modified_base 19: mod_base = OTHER; note = 2'-O-methyladenosine
  modified_base 20: mod_base = gm
  modified_base 21: mod_base = OTHER; note = 2'-O-methyladenosine
  source 1..21: mol_type = other RNA
ggatgtgcctcaactacnaga

SEQ ID NO: 1227 - RNA, 21 nt, synthetic construct
  modified_base 1: mod_base = cm
  modified_base 1^2: mod_base = OTHER; note = phosphorothioate linkage
  modified_base 2: mod_base = OTHER; note = 2'-O-methyladenosine
  modified_base 3: mod_base = gm
  modified_base 4: mod_base = cm
  modified_base 5: mod_base = um
  modified_base 6: mod_base = um
  modified_base 7: mod_base = cm
  modified_base 8: mod_base = cm
  modified_base 9: mod_base = OTHER; note = 2'-fluoroadenosine
  modified_base 10: mod_base = OTHER; note = 2'-fluorocytidine
  modified_base 11: mod_base = OTHER; note = 2'-fluorouridine
  modified_base 12: mod_base = OTHER; note = 2'-O-methyladenosine
  modified_base 13: mod_base = cm
  modified_base 14: mod_base = OTHER; note = 2'-O-methyladenosine
  modified_base 15: mod_base = OTHER; note = 2'-O-methyladenosine
  modified_base 16: mod_base = OTHER; note = 2'-O-methylinosine
  modified_base 17: mod_base = OTHER; note = 2'-O-methyladenosine
  modified_base 18: mod_base = cm
  modified_base 19: mod_base = cm
  modified_base 20: mod_base = um
  modified_base 21: mod_base = um
  source 1..21: mol_type = other RNA
cagcttccactacaanacctt

SEQ ID NO: 1228 - RNA, 21 nt, synthetic construct
  modified_base 1: mod_base = gm
  modified_base 1^2: mod_base = OTHER; note = phosphorothioate linkage
  modified_base 2: mod_base = OTHER; note = 2'-O-methyladenosine
  modified_base 3: mod_base = cm
  modified_base 4: mod_base = OTHER; note = 2'-O-methyladenosine
  modified_base 5: mod_base = gm
  modified_base 6: mod_base = cm
  modified_base 7: mod_base = gm
  modified_base 8: mod_base = OTHER; note = 2'-O-methyladenosine
  modified_base 9: mod_base = OTHER; note = 2'-fluoroguanosine
  modified_base 10: mod_base = OTHER; note = 2'-fluoroadenosine
  modified_base 11: mod_base = OTHER; note = 2'-fluorocytidine
  modified_base 12: mod_base = cm
  modified_base 13: mod_base = um
  modified_base 14: mod_base = gm
  modified_base 15: mod_base = cm
  modified_base 16: mod_base = um
  modified_base 17: mod_base = um
  modified_base 18: mod_base = gm
  modified_base 19: mod_base = OTHER; note = 2'-O-methyladenosine
  modified_base 20: mod_base = OTHER; note = 2'-O-methyladenosine
  modified_base 21: mod_base = OTHER; note = 2'-O-methyladenosine
  source 1..21: mol_type = other RNA
gacagcgagacctgcttgaaa

SEQ ID NO: 1229 - RNA, 21 nt, synthetic construct
  modified_base 1: mod_base = cm
  modified_base 1^2: mod_base = OTHER; note = phosphorothioate linkage
  modified_base 2: mod_base = cm
  modified_base 3: mod_base = OTHER; note = 2'-O-methyladenosine
  modified_base 4: mod_base = OTHER; note = 2'-O-methyladenosine
  modified_base 5: mod_base = cm
  modified_base 6: mod_base = gm
  modified_base 7: mod_base = um
  modified_base 8: mod_base = cm
  modified_base 9: mod_base = OTHER; note = 2'-fluoroadenosine
  modified_base 10: mod_base = OTHER; note = 2'-fluorocytidine
  modified_base 11: mod_base = OTHER; note = 2'-fluorocytidine
  modified_base 12: mod_base = OTHER; note = 2'-O-methyladenosine
  modified_base 13: mod_base = um
  modified_base 14: mod_base = cm
  modified_base 15: mod_base = um
  modified_base 16: mod_base = um
  modified_base 17: mod_base = cm
  modified_base 18: mod_base = OTHER; note = 2'-O-methyladenosine
  modified_base 19: mod_base = gm
  modified_base 20: mod_base = OTHER; note = 2'-O-methyladenosine
  modified_base 21: mod_base = OTHER; note = 2'-O-methyladenosine
  source 1..21: mol_type = other RNA
ccaacgtcaccatcttcagaa

SEQ ID NO: 1230 - RNA, 21 nt, synthetic construct
  modified_base 1: mod_base = cm
  modified_base 1^2: mod_base = OTHER; note = phosphorothioate linkage
  modified_base 2: mod_base = OTHER; note = 2'-O-methyl-2-aminoadenosine
  modified_base 3: mod_base = OTHER; note = 2'-O-methyladenosine
  modified_base 4: mod_base = cm
  modified_base 5: mod_base = gm
  modified_base 6: mod_base = um
  modified_base 7: mod_base = cm
  modified_base 8: mod_base = OTHER; note = 2'-O-methyladenosine
  modified_base 9: mod_base = OTHER; note = 2'-fluorocytidine
  modified_base 10: mod_base = OTHER; note = 2'-fluorocytidine
  modified_base 11: mod_base = OTHER; note = 2'-fluoroadenosine
  modified_base 12: mod_base = um
  modified_base 13: mod_base = cm
  modified_base 14: mod_base = um
  modified_base 15: mod_base = um
  modified_base 16: mod_base = cm
  modified_base 17: mod_base = OTHER; note = 2'-O-methyladenosine
  modified_base 18: mod_base = OTHER; note = 2'-O-methylinosine
  modified_base 19: mod_base = OTHER; note = 2'-O-methyladenosine
  modified_base 20: mod_base = cm
  modified_base 21: mod_base = OTHER; note = 2'-O-methyladenosine
  source 1..21: mol_type = other RNA
cnacgtcaccatcttcanaca

SEQ ID NO: 1231 - RNA, 21 nt, synthetic construct
  modified_base 1: mod_base = cm
  modified_base 1^2: mod_base = OTHER; note = phosphorothioate linkage
  modified_base 2: mod_base = OTHER; note = 2'-O-methyladenosine
  modified_base 3: mod_base = um
  modified_base 4: mod_base = cm
  modified_base 5: mod_base = cm
  modified_base 6: mod_base = OTHER; note = 2'-O-methyladenosine
  modified_base 7: mod_base = gm
  modified_base 8: mod_base = gm
  modified_base 9: mod_base = OTHER; note = 2'-fluorocytidine
  modified_base 10: mod_base = OTHER; note = 2'-fluorocytidine
  modified_base 11: mod_base = OTHER; note = 2'-fluoroguanosine
  modified_base 12: mod_base = OTHER; note = 2'-O-methyladenosine
  modified_base 13: mod_base = um
  modified_base 14: mod_base = gm
  modified_base 15: mod_base = OTHER; note = 2'-O-methyladenosine
  modified_base 16: mod_base = cm
  modified_base 17: mod_base = um
  modified_base 18: mod_base = um
  modified_base 19: mod_base = cm
  modified_base 20: mod_base = cm
  modified_base 21: mod_base = OTHER; note = 2'-O-methyladenosine
  source 1..21: mol_type = other RNA
catccaggccgatgacttcca

SEQ ID NO: 1232 - RNA, 21 nt, synthetic construct
  modified_base 1: mod_base = gm
  modified_base 1^2: mod_base = OTHER; note = phosphorothioate linkage
  modified_base 2: mod_base = cm
  modified_base 3: mod_base = cm
  modified_base 4: mod_base = um
  modified_base 5: mod_base = um
  modified_base 6: mod_base = cm
  modified_base 7: mod_base = um
  modified_base 8: mod_base = um
  modified_base 9: mod_base = OTHER; note = 2'-fluorocytidine
  modified_base 10: mod_base = OTHER; note = 2'-fluoroadenosine
  modified_base 11: mod_base = OTHER; note = 2'-fluoroadenosine
  modified_base 12: mod_base = cm
  modified_base 13: mod_base = OTHER; note = 2'-O-methyladenosine
  modified_base 14: mod_base = cm
  modified_base 15: mod_base = cm
  modified_base 16: mod_base = um
  modified_base 17: mod_base = um
  modified_base 18: mod_base = cm
  modified_base 19: mod_base = OTHER; note = 2'-O-methyladenosine
  modified_base 20: mod_base = OTHER; note = 2'-O-methyladenosine
  modified_base 21: mod_base = OTHER; note = 2'-O-methyladenosine
  source 1..21: mol_type = other RNA
gccttcttcaacaccttcaaa

SEQ ID NO: 1233 - RNA, 21 nt, synthetic construct
  modified_base 1: mod_base = gm
  modified_base 1^2: mod_base = OTHER; note = phosphorothioate linkage
  modified_base 2: mod_base = OTHER; note = 2'-O-methyl-2-aminoadenosine
  modified_base 3: mod_base = OTHER; note = 2'-O-methyladenosine
  modified_base 4: mod_base = gm
  modified_base 5: mod_base = um
  modified_base 6: mod_base = OTHER; note = 2'-O-methyladenosine
  modified_base 7: mod_base = um
  modified_base 8: mod_base = gm
  modified_base 9: mod_base = OTHER; note = 2'-fluorocytidine
  modified_base 10: mod_base = OTHER; note = 2'-fluorouridine
  modified_base 11: mod_base = OTHER; note = 2'-fluorocytidine
  modified_base 12: mod_base = OTHER; note = 2'-O-methyladenosine
  modified_base 13: mod_base = gm
  modified_base 14: mod_base = cm
  modified_base 15: mod_base = OTHER; note = 2'-O-methyladenosine
  modified_base 16: mod_base = cm
  modified_base 17: mod_base = um
  modified_base 18: mod_base = gm
  modified_base 19: mod_base = OTHER; note = 2'-O-methylinosine
  modified_base 20: mod_base = um
  modified_base 21: mod_base = OTHER; note = 2'-O-methyladenosine
  source 1..21: mol_type = other RNA
gnagtatgctcagcactgnta

SEQ ID NO: 1234 - RNA, 21 nt, synthetic construct
  modified_base 1: mod_base = gm
  modified_base 1^2: mod_base = OTHER; note = phosphorothioate linkage
  modified_base 2: mod_base = OTHER; note = 2'-O-methyl-2-aminoadenosine
  modified_base 3: mod_base = OTHER; note = 2'-O-methyladenosine
  modified_base 4: mod_base = cm
  modified_base 5: mod_base = cm
  modified_base 6: mod_base = um
  modified_base 7: mod_base = OTHER; note = 2'-O-methyladenosine
  modified_base 8: mod_base = cm
  modified_base 9: mod_base = OTHER; note = 2'-fluorouridine
  modified_base 10: mod_base = OTHER; note = 2'-fluoroadenosine
  modified_base 11: mod_base = OTHER; note = 2'-fluorocytidine
  modified_base 12: mod_base = um
  modified_base 13: mod_base = cm
  modified_base 14: mod_base = gm
  modified_base 15: mod_base = OTHER; note = 2'-O-methyladenosine
  modified_base 16: mod_base = OTHER; note = 2'-O-methyladenosine
  modified_base 17: mod_base = cm
  modified_base 18: mod_base = um
  modified_base 19: mod_base = OTHER; note = 2'-O-methylinosine
  modified_base 20: mod_base = cm
  modified_base 21: mod_base = OTHER; note = 2'-O-methyladenosine
  source 1..21: mol_type = other RNA
gnacctactactcgaactnca

SEQ ID NO: 1235 - RNA, 21 nt, synthetic construct
  modified_base 1: mod_base = OTHER; note = 2'-O-methyladenosine
  modified_base 1^2: mod_base = OTHER; note = phosphorothioate linkage
  modified_base 2: mod_base = cm
  modified_base 3: mod_base = OTHER; note = 2'-O-methyladenosine
  modified_base 4: mod_base = gm
  modified_base 5: mod_base = gm
  modified_base 6: mod_base = gm
  modified_base 7: mod_base = OTHER; note = 2'-O-methyladenosine
  modified_base 8: mod_base = cm
  modified_base 9: mod_base = OTHER; note = 2'-fluorocytidine
  modified_base 10: mod_base = OTHER; note = 2'-fluoroadenosine
  modified_base 11: mod_base = OTHER; note = 2'-fluorocytidine
  modified_base 12: mod_base = cm
  modified_base 13: mod_base = um
  modified_base 14: mod_base = gm
  modified_base 15: mod_base = cm
  modified_base 16: mod_base = um
  modified_base 17: mod_base = um
  modified_base 18: mod_base = cm
  modified_base 19: mod_base = OTHER; note = 2'-O-methyladenosine
  modified_base 20: mod_base = OTHER; note = 2'-O-methyladenosine
  modified_base 21: mod_base = OTHER; note = 2'-O-methyladenosine
  source 1..21: mol_type = other RNA
acagggaccacctgcttcaaa

SEQ ID NO: 1236 - RNA, 21 nt, synthetic construct
  modified_base 1: mod_base = cm
  modified_base 1^2: mod_base = OTHER; note = phosphorothioate linkage
  modified_base 2: mod_base = cm
  modified_base 3: mod_base = um
  modified_base 4: mod_base = gm
  modified_base 5: mod_base = cm
  modified_base 6: mod_base = um
  modified_base 7: mod_base = cm
  modified_base 8: mod_base = cm
  modified_base 9: mod_base = OTHER; note = 2'-fluoroadenosine
  modified_base 10: mod_base = OTHER; note = 2'-fluoroadenosine
  modified_base 11: mod_base = OTHER; note = 2'-fluoroguanosine
  modified_base 12: mod_base = gm
  modified_base 13: mod_base = cm
  modified_base 14: mod_base = um
  modified_base 15: mod_base = OTHER; note = 2'-O-methyladenosine
  modified_base 16: mod_base = um
  modified_base 17: mod_base = cm
  modified_base 18: mod_base = OTHER; note = 2'-O-methyladenosine
  modified_base 19: mod_base = OTHER; note = 2'-O-methyladenosine
  modified_base 20: mod_base = gm
  modified_base 21: mod_base = OTHER; note = 2'-O-methyladenosine
  source 1..21: mol_type = other RNA
cctgctccaaggctatcaaga

SEQ ID NO: 1237 - RNA, 21 nt, synthetic construct
  modified_base 1: mod_base = cm
  modified_base 1^2: mod_base = OTHER; note = phosphorothioate linkage
  modified_base 2: mod_base = OTHER; note = 2'-O-methyl-2-aminoadenosine
  modified_base 3: mod_base = um
  modified_base 4: mod_base = gm
  modified_base 5: mod_base = um
  modified_base 6: mod_base = gm
  modified_base 7: mod_base = gm
  modified_base 8: mod_base = OTHER; note = 2'-O-methyladenosine
  modified_base 9: mod_base = OTHER; note = 2'-fluoroadenosine
  modified_base 10: mod_base = OTHER; note = 2'-fluorocytidine
  modified_base 11: mod_base = OTHER; note = 2'-fluorocytidine
  modified_base 12: mod_base = OTHER; note = 2'-O-methyladenosine
  modified_base 13: mod_base = cm
  modified_base 14: mod_base = gm
  modified_base 15: mod_base = OTHER; note = 2'-O-methyladenosine
  modified_base 16: mod_base = um
  modified_base 17: mod_base = OTHER; note = 2'-O-methylinosine
  modified_base 18: mod_base = OTHER; note = 2'-O-methyladenosine
  modified_base 19: mod_base = cm
  modified_base 20: mod_base = OTHER; note = 2'-O-methyladenosine
  modified_base 21: mod_base = OTHER; note = 2'-O-methyladenosine
  source 1..21: mol_type = other RNA
cntgtggaaccacgatnacaa

SEQ ID NO: 1238 - RNA, 21 nt, synthetic construct
  modified_base 1: mod_base = OTHER; note = 2'-O-methyladenosine
  modified_base 1^2: mod_base = OTHER; note = phosphorothioate linkage
  modified_base 2: mod_base = gm
  modified_base 3: mod_base = gm
  modified_base 4: mod_base = cm
  modified_base 5: mod_base = OTHER; note = 2'-O-methyladenosine
  modified_base 6: mod_base = OTHER; note = 2'-O-methyladenosine
  modified_base 7: mod_base = gm
  modified_base 8: mod_base = OTHER; note = 2'-O-methyladenosine
  modified_base 9: mod_base = OTHER; note = 2'-fluorocytidine
  modified_base 10: mod_base = OTHER; note = 2'-fluorocytidine
  modified_base 11: mod_base = OTHER; note = 2'-fluorouridine
  modified_base 12: mod_base = cm
  modified_base 13: mod_base = um
  modified_base 14: mod_base = gm
  modified_base 15: mod_base = cm
  modified_base 16: mod_base = um
  modified_base 17: mod_base = um
  modified_base 18: mod_base = cm
  modified_base 19: mod_base = um
  modified_base 20: mod_base = OTHER; note = 2'-O-methylinosine
  modified_base 21: mod_base = um
  source 1..21: mol_type = other RNA
aggcaagacctctgcttctnt

SEQ ID NO: 1239 - RNA, 21 nt, synthetic construct
  modified_base 1: mod_base = um
  modified_base 1^2: mod_base = OTHER; note = phosphorothioate linkage
  modified_base 2: mod_base = cm
  modified_base 3: mod_base = cm
  modified_base 4: mod_base = OTHER; note = 2'-O-methyladenosine
  modified_base 5: mod_base = cm
  modified_base 6: mod_base = OTHER; note = 2'-O-methyladenosine
  modified_base 7: mod_base = gm
  modified_base 8: mod_base = OTHER; note = 2'-O-methyladenosine
  modified_base 9: mod_base = OTHER; note = 2'-fluorocytidine
  modified_base 10: mod_base = OTHER; note = 2'-fluorouridine
  modified_base 11: mod_base = OTHER; note = 2'-fluoroguanosine
  modified_base 12: mod_base = cm
  modified_base 13: mod_base = OTHER; note = 2'-O-methyladenosine
  modified_base 14: mod_base = cm
  modified_base 15: mod_base = cm
  modified_base 16: mod_base = OTHER; note = 2'-O-methyladenosine
  modified_base 17: mod_base = OTHER; note = 2'-O-methyladenosine
  modified_base 18: mod_base = cm
  modified_base 19: mod_base = um
  modified_base 20: mod_base = OTHER; note = 2'-O-methylinosine
  modified_base 21: mod_base = OTHER; note = 2'-O-methyladenosine
  source 1..21: mol_type = other RNA
tccacagactgcaccaactna

SEQ ID NO: 1240 - RNA, 21 nt, synthetic construct
  modified_base 1: mod_base = gm
  modified_base 1^2: mod_base = OTHER; note = phosphorothioate linkage
  modified_base 2: mod_base = cm
  modified_base 3: mod_base = OTHER; note = 2'-O-methyladenosine
  modified_base 4: mod_base = gm
  modified_base 5: mod_base = um
  modified_base 6: mod_base = gm
  modified_base 7: mod_base = cm
  modified_base 8: mod_base = cm
  modified_base 9: mod_base = OTHER; note = 2'-fluorouridine
  modified_base 10: mod_base = OTHER; note = 2'-fluorouridine
  modified_base 11: mod_base = OTHER; note = 2'-fluorocytidine
  modified_base 12: mod_base = OTHER; note = 2'-O-methyladenosine
  modified_base 13: mod_base = cm
  modified_base 14: mod_base = um
  modified_base 15: mod_base = gm
  modified_base 16: mod_base = um
  modified_base 17: mod_base = OTHER; note = 2'-O-methyladenosine
  modified_base 18: mod_base = cm
  modified_base 19: mod_base = um
  modified_base 20: mod_base = OTHER; note = 2'-O-methylinosine
  modified_base 21: mod_base = OTHER; note = 2'-O-methyladenosine
  source 1..21: mol_type = other RNA
gcagtgccttcactgtactna

SEQ ID NO: 1241 - RNA, 21 nt, synthetic construct
  modified_base 1: mod_base = gm
  modified_base 1^2: mod_base = OTHER; note = phosphorothioate linkage
  modified_base 2: mod_base = cm
  modified_base 3: mod_base = um
  modified_base 4: mod_base = gm
  modified_base 5: mod_base = um
  modified_base 6: mod_base = gm
  modified_base 7: mod_base = gm
  modified_base 8: mod_base = gm
  modified_base 9: mod_base = OTHER; note = 2'-fluoroadenosine
  modified_base 10: mod_base = OTHER; note = 2'-fluoroadenosine
  modified_base 11: mod_base = OTHER; note = 2'-fluorocytidine
  modified_base 12: mod_base = um
  modified_base 13: mod_base = um
  modified_base 14: mod_base = cm
  modified_base 15: mod_base = OTHER; note = 2'-O-methyladenosine
  modified_base 16: mod_base = OTHER; note = 2'-O-methyladenosine
  modified_base 17: mod_base = cm
  modified_base 18: mod_base = OTHER; note = 2'-O-methyladenosine
  modified_base 19: mod_base = OTHER; note = 2'-O-methylinosine
  modified_base 20: mod_base = cm
  modified_base 21: mod_base = OTHER; note = 2'-O-methyladenosine
  source 1..21: mol_type = other RNA
gctgtgggaacttcaacanca

SEQ ID NO: 1242 - RNA, 21 nt, synthetic construct
  modified_base 1: mod_base = gm
  modified_base 1^2: mod_base = OTHER; note = phosphorothioate linkage
  modified_base 2: mod_base = um
  modified_base 3: mod_base = gm
  modified_base 4: mod_base = gm
  modified_base 5: mod_base = gm
  modified_base 6: mod_base = OTHER; note = 2'-O-methyladenosine
  modified_base 7: mod_base = OTHER; note = 2'-O-methyladenosine
  modified_base 8: mod_base = cm
  modified_base 9: mod_base = OTHER; note = 2'-fluorouridine
  modified_base 10: mod_base = OTHER; note = 2'-fluorouridine
  modified_base 11: mod_base = OTHER; note = 2'-fluorocytidine
  modified_base 12: mod_base = OTHER; note = 2'-O-methyladenosine
  modified_base 13: mod_base = OTHER; note = 2'-O-methyladenosine
  modified_base 14: mod_base = cm
  modified_base 15: mod_base = OTHER; note = 2'-O-methyladenosine
  modified_base 16: mod_base = OTHER; note = 2'-O-methylinosine
  modified_base 17: mod_base = cm
  modified_base 18: mod_base = OTHER; note = 2'-O-methyladenosine
  modified_base 19: mod_base = um
  modified_base 20: mod_base = cm
  modified_base 21: mod_base = OTHER; note = 2'-O-methyladenosine
  source 1..21: mol_type = other RNA
gtgggaacttcaacancatca

SEQ ID NO: 1243 - RNA, 21 nt, synthetic construct
  modified_base 1: mod_base = gm
  modified_base 1^2: mod_base = OTHER; note = phosphorothioate linkage
  modified_base 2: mod_base = cm
  modified_base 3: mod_base = um
  modified_base 4: mod_base = um
  modified_base 5: mod_base = cm
  modified_base 6: mod_base = OTHER; note = 2'-O-methyladenosine
  modified_base 7: mod_base = OTHER; note = 2'-O-methyladenosine
  modified_base 8: mod_base = cm
  modified_base 9: mod_base = OTHER; note = 2'-fluoroadenosine
  modified_base 10: mod_base = OTHER; note = 2'-fluorocytidine
  modified_base 11: mod_base = OTHER; note = 2'-fluorocytidine
  modified_base 12: mod_base = um
  modified_base 13: mod_base = um
  modified_base 14: mod_base = cm
  modified_base 15: mod_base = OTHER; note = 2'-O-methyladenosine
  modified_base 16: mod_base = OTHER; note = 2'-O-methyladenosine
  modified_base 17: mod_base = OTHER; note = 2'-O-methylinosine
  modified_base 18: mod_base = OTHER; note = 2'-O-methyladenosine
  modified_base 19: mod_base = cm
  modified_base 20: mod_base = cm
  modified_base 21: mod_base = OTHER; note = 2'-O-methyladenosine
  source 1..21: mol_type = other RNA
gcttcaacaccttcaanacca

SEQ ID NO: 1244 - RNA, 21 nt, synthetic construct
  modified_base 1: mod_base = cm
  modified_base 1^2: mod_base = OTHER; note = phosphorothioate linkage
  modified_base 2: mod_base = cm
  modified_base 3: mod_base = cm
  modified_base 4: mod_base = cm
  modified_base 5: mod_base = OTHER; note = 2'-O-methyladenosine
  modified_base 6: mod_base = OTHER; note = 2'-O-methyladenosine
  modified_base 7: mod_base = cm
  modified_base 8: mod_base = OTHER; note = 2'-O-methyladenosine
  modified_base 9: mod_base = OTHER; note = 2'-fluorouridine
  modified_base 10: mod_base = OTHER; note = 2'-fluorocytidine
  modified_base 11: mod_base = OTHER; note = 2'-fluoroadenosine
  modified_base 12: mod_base = gm
  modified_base 13: mod_base = gm
  modified_base 14: mod_base = OTHER; note = 2'-O-methyladenosine
  modified_base 15: mod_base = OTHER; note = 2'-O-methyladenosine
  modified_base 16: mod_base = cm
  modified_base 17: mod_base = OTHER; note = 2'-O-methyladenosine
  modified_base 18: mod_base = OTHER; note = 2'-O-methylinosine
  modified_base 19: mod_base = cm
  modified_base 20: mod_base = um
  modified_base 21: mod_base = um
  source 1..21: mol_type = other RNA
ccccaacatcaggaacanctt

SEQ ID NO: 1245 - RNA, 21 nt, synthetic construct
  modified_base 1: mod_base = cm
  modified_base 1^2: mod_base = OTHER; note = phosphorothioate linkage
  modified_base 2: mod_base = cm
  modified_base 3: mod_base = um
  modified_base 4: mod_base = OTHER; note = 2'-O-methyladenosine
  modified_base 5: mod_base = cm
  modified_base 6: mod_base = um
  modified_base 7: mod_base = OTHER; note = 2'-O-methyladenosine
  modified_base 8: mod_base = cm
  modified_base 9: mod_base = OTHER; note = 2'-fluorouridine
  modified_base 10: mod_base = OTHER; note = 2'-fluorocytidine
  modified_base 11: mod_base = OTHER; note = 2'-fluoroguanosine
  modified_base 12: mod_base = OTHER; note = 2'-O-methyladenosine
  modified_base 13: mod_base = OTHER; note = 2'-O-methyladenosine
  modified_base 14: mod_base = cm
  modified_base 15: mod_base = um
  modified_base 16: mod_base = OTHER; note = 2'-O-methylinosine
  modified_base 17: mod_base = cm
  modified_base 18: mod_base = OTHER; note = 2'-O-methyladenosine
  modified_base 19: mod_base = um
  modified_base 20: mod_base = gm
  modified_base 21: mod_base = um
  source 1..21: mol_type = other RNA
cctactactcgaactncatgt

SEQ ID NO: 1246 - RNA, 21 nt, synthetic construct
  modified_base 1: mod_base = gm
  modified_base 1^2: mod_base = OTHER; note = phosphorothioate linkage
  modified_base 2: mod_base = um
  modified_base 3: mod_base = cm
  modified_base 4: mod_base = OTHER; note = 2'-O-methyladenosine
  modified_base 5: mod_base = cm
  modified_base 6: mod_base = cm
  modified_base 7: mod_base = um
  modified_base 8: mod_base = gm
  modified_base 9: mod_base = OTHER; note = 2'-fluorocytidine
  modified_base 10: mod_base = OTHER; note = 2'-fluoroadenosine
  modified_base 11: mod_base = OTHER; note = 2'-fluoroguanosine
  modified_base 12: mod_base = um
  modified_base 13: mod_base = gm
  modified_base 14: mod_base = um
  modified_base 15: mod_base = um
  modified_base 16: mod_base = gm
  modified_base 17: mod_base = OTHER; note = 2'-O-methylinosine
  modified_base 18: mod_base = cm
  modified_base 19: mod_base = um
  modified_base 20: mod_base = um
  modified_base 21: mod_base = OTHER; note = 2'-O-methyladenosine
  source 1..21: mol_type = other RNA
gtcacctgcagtgttgnctta

SEQ ID NO: 1247 - RNA, 21 nt, synthetic construct
  modified_base 1: mod_base = gm
  modified_base 1^2: mod_base = OTHER; note = phosphorothioate linkage
  modified_base 2: mod_base = cm
  modified_base 3: mod_base = um
  modified_base 4: mod_base = gm
  modified_base 5: mod_base = gm
  modified_base 6: mod_base = OTHER; note = 2'-O-methyladenosine
  modified_base 7: mod_base = cm
  modified_base 8: mod_base = OTHER; note = 2'-O-methyladenosine
  modified_base 9: mod_base = OTHER; note = 2'-fluorouridine
  modified_base 10: mod_base = OTHER; note = 2'-fluoroguanosine
  modified_base 11: mod_base = OTHER; note = 2'-fluoroadenosine
  modified_base 12: mod_base = cm
  modified_base 13: mod_base = cm
  modified_base 14: mod_base = um
  modified_base 15: mod_base = gm
  modified_base 16: mod_base = um
  modified_base 17: mod_base = um
  modified_base 18: mod_base = OTHER; note = 2'-O-methyladenosine
  modified_base 19: mod_base = cm
  modified_base 20: mod_base = OTHER; note = 2'-O-methyladenosine
  modified_base 21: mod_base = OTHER; note = 2'-O-methyladenosine
  source 1..21: mol_type = other RNA
gctggacatgacctgttacaa

SEQ ID NO: 1248 - RNA, 21 nt, synthetic construct
  modified_base 1: mod_base = gm
  modified_base 1^2: mod_base = OTHER; note = phosphorothioate linkage
  modified_base 2: mod_base = cm
  modified_base 3: mod_base = OTHER; note = 2'-O-methyladenosine
  modified_base 4: mod_base = gm
  modified_base 5: mod_base = OTHER; note = 2'-O-methyladenosine
  modified_base 6: mod_base = gm
  modified_base 7: mod_base = cm
  modified_base 8: mod_base = um
  modified_base 9: mod_base = OTHER; note = 2'-fluoroadenosine
  modified_base 10: mod_base = OTHER; note = 2'-fluorocytidine
  modified_base 11: mod_base = OTHER; note = 2'-fluoroadenosine
  modified_base 12: mod_base = gm
  modified_base 13: mod_base = cm
  modified_base 14: mod_base = um
  modified_base 15: mod_base = um
  modified_base 16: mod_base = cm
  modified_base 17: mod_base = OTHER; note = 2'-O-methyladenosine
  modified_base 18: mod_base = OTHER; note = 2'-O-methyladenosine
  modified_base 19: mod_base = cm
  modified_base 20: mod_base = OTHER; note = 2'-O-methylinosine
  modified_base 21: mod_base = OTHER; note = 2'-O-methyladenosine
  source 1..21: mol_type = other RNA
gcagagctacagcttcaacna

SEQ ID NO: 1249 - RNA, 21 nt, synthetic construct
  modified_base 1: mod_base = gm
  modified_base 1^2: mod_base = OTHER; note = phosphorothioate linkage
  modified_base 2: mod_base = OTHER; note = 2'-O-methyl-2-aminoadenosine
  modified_base 3: mod_base = OTHER; note = 2'-O-methyladenosine
  modified_base 4: mod_base = gm
  modified_base 5: mod_base = um
  modified_base 6: mod_base = OTHER; note = 2'-O-methyladenosine
  modified_base 7: mod_base = um
  modified_base 8: mod_base = gm
  modified_base 9: mod_base = OTHER; note = 2'-fluorocytidine
  modified_base 10: mod_base = OTHER; note = 2'-fluorouridine
  modified_base 11: mod_base = OTHER; note = 2'-fluorocytidine
  modified_base 12: mod_base = OTHER; note = 2'-O-methyladenosine
  modified_base 13: mod_base = gm
  modified_base 14: mod_base = um
  modified_base 15: mod_base = OTHER; note = 2'-O-methyladenosine
  modified_base 16: mod_base = cm
  modified_base 17: mod_base = um
  modified_base 18: mod_base = gm
  modified_base 19: mod_base = OTHER; note = 2'-O-methylinosine
  modified_base 20: mod_base = um
  modified_base 21: mod_base = OTHER; note = 2'-O-methyladenosine
  source 1..21: mol_type = other RNA
gnagtatgctcagtactgnta

SEQ ID NO: 1250 - RNA, 21 nt, synthetic construct
  modified_base 1: mod_base = cm
  modified_base 1^2: mod_base = OTHER; note = phosphorothioate linkage
  modified_base 2: mod_base = um
  modified_base 3: mod_base = gm
  modified_base 4: mod_base = cm
  modified_base 5: mod_base = um
  modified_base 6: mod_base = OTHER; note = 2'-O-methyladenosine
  modified_base 7: mod_base = cm
  modified_base 8: mod_base = OTHER; note = 2'-O-methyladenosine
  modified_base 9: mod_base = OTHER; note = 2'-fluoroadenosine
  modified_base 10: mod_base = OTHER; note = 2'-fluorocytidine
  modified_base 11: mod_base = OTHER; note = 2'-fluorouridine
  modified_base 12: mod_base = OTHER; note = 2'-O-methyladenosine
  modified_base 13: mod_base = um
  modified_base 14: mod_base = gm
  modified_base 15: mod_base = OTHER; note = 2'-O-methyladenosine
  modified_base 16: mod_base = gm
  modified_base 17: mod_base = OTHER; note = 2'-O-methyladenosine
  modified_base 18: mod_base = um
  modified_base 19: mod_base = cm
  modified_base 20: mod_base = cm
  modified_base 21: mod_base = OTHER; note = 2'-O-methyladenosine
  source 1..21: mol_type = other RNA
ctgctacaactatgagatcca

SEQ ID NO: 1251 - RNA, 21 nt, synthetic construct
  modified_base 1: mod_base = cm
  modified_base 1^2: mod_base = OTHER; note = phosphorothioate linkage
  modified_base 2: mod_base = um
  modified_base 3: mod_base = gm
  modified_base 4: mod_base = cm
  modified_base 5: mod_base = um
  modified_base 6: mod_base = OTHER; note = 2'-O-methyladenosine
  modified_base 7: mod_base = cm
  modified_base 8: mod_base = OTHER; note = 2'-O-methyladenosine
  modified_base 9: mod_base = OTHER; note = 2'-fluoroadenosine
  modified_base 10: mod_base = OTHER; note = 2'-fluorocytidine
  modified_base 11: mod_base = OTHER; note = 2'-fluorouridine
  modified_base 12: mod_base = OTHER; note = 2'-O-methyladenosine
  modified_base 13: mod_base = um
  modified_base 14: mod_base = gm
  modified_base 15: mod_base = OTHER; note = 2'-O-methyladenosine
  modified_base 16: mod_base = OTHER; note = 2'-O-methylinosine
  modified_base 17: mod_base = OTHER; note = 2'-O-methyladenosine
  modified_base 18: mod_base = um
  modified_base 19: mod_base = cm
  modified_base 20: mod_base = cm
  modified_base 21: mod_base = OTHER; note = 2'-O-methyladenosine
  source 1..21: mol_type = other RNA
ctgctacaactatganatcca

SEQ ID NO: 1252 - RNA, 21 nt, synthetic construct
  modified_base 1: mod_base = cm
  modified_base 1^2: mod_base = OTHER; note = phosphorothioate linkage
  modified_base 2: mod_base = cm
  modified_base 3: mod_base = um
  modified_base 4: mod_base = gm
  modified_base 5: mod_base = gm
  modified_base 6: mod_base = OTHER; note = 2'-O-methyladenosine
  modified_base 7: mod_base = cm
  modified_base 8: mod_base = cm
  modified_base 9: mod_base = OTHER; note = 2'-fluoroadenosine
  modified_base 10: mod_base = OTHER; note = 2'-fluoroadenosine
  modified_base 11: mod_base = OTHER; note = 2'-fluoroguanosine
  modified_base 12: mod_base = um
  modified_base 13: mod_base = gm
  modified_base 14: mod_base = gm
  modified_base 15: mod_base = um
  modified_base 16: mod_base = um
  modified_base 17: mod_base = um
  modified_base 18: mod_base = gm
  modified_base 19: mod_base = OTHER; note = 2'-O-methyladenosine
  modified_base 20: mod_base = cm
  modified_base 21: mod_base = OTHER; note = 2'-O-methyladenosine
  source 1..21: mol_type = other RNA
cctggaccaagtggtttgaca

SEQ ID NO: 1253 - RNA, 21 nt, synthetic construct
  modified_base 1: mod_base = cm
  modified_base 1^2: mod_base = OTHER; note = phosphorothioate linkage
  modified_base 2: mod_base = cm
  modified_base 3: mod_base = um
  modified_base 4: mod_base = gm
  modified_base 5: mod_base = gm
  modified_base 6: mod_base = OTHER; note = 2'-O-methyladenosine
  modified_base 7: mod_base = cm
  modified_base 8: mod_base = cm
  modified_base 9: mod_base = OTHER; note = 2'-fluoroadenosine
  modified_base 10: mod_base = OTHER; note = 2'-fluoroadenosine
  modified_base 11: mod_base = OTHER; note = 2'-fluoroguanosine
  modified_base 12: mod_base = um
  modified_base 13: mod_base = gm
  modified_base 14: mod_base = gm
  modified_base 15: mod_base = um
  modified_base 16: mod_base = um
  modified_base 17: mod_base = um
  modified_base 18: mod_base = OTHER; note = 2'-O-methylinosine
  modified_base 19: mod_base = OTHER; note = 2'-O-methyladenosine
  modified_base 20: mod_base = cm
  modified_base 21: mod_base = OTHER; note = 2'-O-methyladenosine
  source 1..21: mol_type = other RNA
cctggaccaagtggtttnaca

SEQ ID NO: 1254 - RNA, 21 nt, synthetic construct
  modified_base 1: mod_base = cm
  modified_base 1^2: mod_base = OTHER; note = phosphorothioate linkage
  modified_base 2: mod_base = gm
  modified_base 3: mod_base = OTHER; note = 2'-O-methyladenosine
  modified_base 4: mod_base = gm
  modified_base 5: mod_base = OTHER; note = 2'-O-methyladenosine
  modified_base 6: mod_base = um
  modified_base 7: mod_base = cm
  modified_base 8: mod_base = OTHER; note = 2'-O-methyladenosine
  modified_base 9: mod_base = OTHER; note = 2'-fluorouridine
  modified_base 10: mod_base = OTHER; note = 2'-fluorocytidine
  modified_base 11: mod_base = OTHER; note = 2'-fluorouridine
  modified_base 12: mod_base = um
  modified_base 13: mod_base = cm
  modified_base 14: mod_base = OTHER; note = 2'-O-methyladenosine
  modified_base 15: mod_base = OTHER; note = 2'-O-methyladenosine
  modified_base 16: mod_base = cm
  modified_base 17: mod_base = OTHER; note = 2'-O-methyladenosine
  modified_base 18: mod_base = OTHER; note = 2'-O-methyladenosine
  modified_base 19: mod_base = cm
  modified_base 20: mod_base = OTHER; note = 2'-O-methyladenosine
  modified_base 21: mod_base = OTHER; note = 2'-O-methyladenosine
  source 1..21: mol_type = other RNA
cgagatcatcttcaacaacaa

SEQ ID NO: 1255 - RNA, 21 nt, synthetic construct
  modified_base 1: mod_base = OTHER; note = 2'-O-methyladenosine
  modified_base 1^2: mod_base = OTHER; note = phosphorothioate linkage
  modified_base 2: mod_base = gm
  modified_base 3: mod_base = cm
  modified_base 4: mod_base = OTHER; note = 2'-O-methyladenosine
  modified_base 5: mod_base = gm
  modified_base 6: mod_base = um
  modified_base 7: mod_base = gm
  modified_base 8: mod_base = cm
  modified_base 9: mod_base = OTHER; note = 2'-fluorocytidine
  modified_base 10: mod_base = OTHER; note = 2'-fluorouridine
  modified_base 11: mod_base = OTHER; note = 2'-fluorouridine
  modified_base 12: mod_base = cm
  modified_base 13: mod_base = OTHER; note = 2'-O-methyladenosine
  modified_base 14: mod_base = cm
  modified_base 15: mod_base = um
  modified_base 16: mod_base = gm
  modified_base 17: mod_base = um
  modified_base 18: mod_base = OTHER; note = 2'-O-methyladenosine
  modified_base 19: mod_base = cm
  modified_base 20: mod_base = um
  modified_base 21: mod_base = OTHER; note = 2'-O-methyladenosine
  source 1..21: mol_type = other RNA
agcagtgccttcactgtacta

SEQ ID NO: 1256 - RNA, 21 nt, synthetic construct
  modified_base 1: mod_base = gm
  modified_base 1^2: mod_base = OTHER; note = phosphorothioate linkage
  modified_base 2: mod_base = OTHER; note = 2'-O-methyladenosine
  modified_base 3: mod_base = cm
  modified_base 4: mod_base = OTHER; note = 2'-O-methyladenosine
  modified_base 5: mod_base = um
  modified_base 6: mod_base = cm
  modified_base 7: mod_base = OTHER; note = 2'-O-methyladenosine
  modified_base 8: mod_base = gm
  modified_base 9: mod_base = OTHER; note = 2'-fluoroguanosine
  modified_base 10: mod_base = OTHER; note = 2'-fluoroadenosine
  modified_base 11: mod_base = OTHER; note = 2'-fluoroadenosine
  modified_base 12: mod_base = cm
  modified_base 13: mod_base = OTHER; note = 2'-O-methyladenosine
  modified_base 14: mod_base = gm
  modified_base 15: mod_base = cm
  modified_base 16: mod_base = um
  modified_base 17: mod_base = um
  modified_base 18: mod_base = cm
  modified_base 19: mod_base = OTHER; note = 2'-O-methylinosine
  modified_base 20: mod_base = OTHER; note = 2'-O-methyladenosine
  modified_base 21: mod_base = OTHER; note = 2'-O-methyladenosine
  source 1..21: mol_type = other RNA
gacatcaggaacagcttcnaa

SEQ ID NO: 1257 - RNA, 21 nt, synthetic construct
  modified_base 1: mod_base = gm
  modified_base 1^2: mod_base = OTHER; note = phosphorothioate linkage
  modified_base 2: mod_base = gm
  modified_base 3: mod_base = cm
  modified_base 4: mod_base = um
  modified_base 5: mod_base = gm
  modified_base 6: mod_base = OTHER; note = 2'-O-methyladenosine
  modified_base 7: mod_base = um
  modified_base 8: mod_base = um
  modified_base 9: mod_base = OTHER; note = 2'-fluorouridine
  modified_base 10: mod_base = OTHER; note = 2'-fluoroguanosine
  modified_base 11: mod_base = OTHER; note = 2'-fluorocytidine
  modified_base 12: mod_base = cm
  modified_base 13: mod_base = um
  modified_base 14: mod_base = gm
  modified_base 15: mod_base = OTHER; note = 2'-O-methyladenosine
  modified_base 16: mod_base = OTHER; note = 2'-O-methyladenosine
  modified_base 17: mod_base = cm
  modified_base 18: mod_base = OTHER; note = 2'-O-methyladenosine
  modified_base 19: mod_base = OTHER; note = 2'-O-methyladenosine
  modified_base 20: mod_base = gm
  modified_base 21: mod_base = OTHER; note = 2'-O-methyladenosine
  source 1..21: mol_type = other RNA
ggctgatttgcctgaacaaga

SEQ ID NO: 1258 - RNA, 21 nt, synthetic construct
  modified_base 1: mod_base = cm
  modified_base 1^2: mod_base = OTHER; note = phosphorothioate linkage
  modified_base 2: mod_base = cm
  modified_base 3: mod_base = OTHER; note = 2'-O-methyladenosine
  modified_base 4: mod_base = gm
  modified_base 5: mod_base = gm
  modified_base 6: mod_base = OTHER; note = 2'-O-methyladenosine
  modified_base 7: mod_base = cm
  modified_base 8: mod_base = OTHER; note = 2'-O-methyladenosine
  modified_base 9: mod_base = OTHER; note = 2'-fluoroadenosine
  modified_base 10: mod_base = OTHER; note = 2'-fluorocytidine
  modified_base 11: mod_base = OTHER; note = 2'-fluorocytidine
  modified_base 12: mod_base = OTHER; note = 2'-O-methyladenosine
  modified_base 13: mod_base = cm
  modified_base 14: mod_base = um
  modified_base 15: mod_base = um
  modified_base 16: mod_base = um
  modified_base 17: mod_base = OTHER; note = 2'-O-methylinosine
  modified_base 18: mod_base = gm
  modified_base 19: mod_base = um
  modified_base 20: mod_base = gm
  modified_base 21: mod_base = OTHER; note = 2'-O-methyladenosine
  source 1..21: mol_type = other RNA
ccaggacaaccactttngtga

SEQ ID NO: 1259 - RNA, 21 nt, synthetic construct
  modified_base 1: mod_base = cm
  modified_base 1^2: mod_base = OTHER; note = phosphorothioate linkage
  modified_base 2: mod_base = OTHER; note = 2'-O-methyladenosine
  modified_base 3: mod_base = OTHER; note = 2'-O-methyladenosine
  modified_base 4: mod_base = cm
  modified_base 5: mod_base = cm
  modified_base 6: mod_base = OTHER; note = 2'-O-methyladenosine
  modified_base 7: mod_base = gm
  modified_base 8: mod_base = OTHER; note = 2'-O-methyladenosine
  modified_base 9: mod_base = OTHER; note = 2'-fluoroadenosine
  modified_base 10: mod_base = OTHER; note = 2'-fluorocytidine
  modified_base 11: mod_base = OTHER; note = 2'-fluoroadenosine
  modified_base 12: mod_base = OTHER; note = 2'-O-methyladenosine
  modified_base 13: mod_base = cm
  modified_base 14: mod_base = cm
  modified_base 15: mod_base = um
  modified_base 16: mod_base = cm
  modified_base 17: mod_base = um
  modified_base 18: mod_base = OTHER; note = 2'-O-methylinosine
  modified_base 19: mod_base = cm
  modified_base 20: mod_base = um
  modified_base 21: mod_base = OTHER; note = 2'-O-methyladenosine
  source 1..21: mol_type = other RNA
caaccagaacaacctctncta

SEQ ID NO: 1260 - RNA, 21 nt, synthetic construct
  modified_base 1: mod_base = cm
  modified_base 1^2: mod_base = OTHER; note = phosphorothioate linkage
  modified_base 2: mod_base = gm
  modified_base 3: mod_base = cm
  modified_base 4: mod_base = um
  modified_base 5: mod_base = OTHER; note = 2'-O-methyladenosine
  modified_base 6: mod_base = cm
  modified_base 7: mod_base = OTHER; note = 2'-O-methyladenosine
  modified_base 8: mod_base = OTHER; note = 2'-O-methyladenosine
  modified_base 9: mod_base = OTHER; note = 2'-fluorocytidine
  modified_base 10: mod_base = OTHER; note = 2'-fluorocytidine
  modified_base 11: mod_base = OTHER; note = 2'-fluoroadenosine
  modified_base 12: mod_base = gm
  modified_base 13: mod_base = cm
  modified_base 14: mod_base = OTHER; note = 2'-O-methyladenosine
  modified_base 15: mod_base = cm
  modified_base 16: mod_base = OTHER; note = 2'-O-methyladenosine
  modified_base 17: mod_base = OTHER; note = 2'-O-methyladenosine
  modified_base 18: mod_base = um
  modified_base 19: mod_base = cm
  modified_base 20: mod_base = um
  modified_base 21: mod_base = OTHER; note = 2'-O-methyladenosine
  source 1..21: mol_type = other RNA
cgctacaaccagcacaatcta

SEQ ID NO: 1261 - RNA, 21 nt, synthetic construct
  modified_base 1: mod_base = cm
  modified_base 1^2: mod_base = OTHER; note = phosphorothioate linkage
  modified_base 2: mod_base = cm
  modified_base 3: mod_base = OTHER; note = 2'-O-methyladenosine
  modified_base 4: mod_base = cm
  modified_base 5: mod_base = OTHER; note = 2'-O-methyladenosine
  modified_base 6: mod_base = OTHER; note = 2'-O-methyladenosine
  modified_base 7: mod_base = cm
  modified_base 8: mod_base = cm
  modified_base 9: mod_base = OTHER; note = 2'-fluoroadenosine
  modified_base 10: mod_base = OTHER; note = 2'-fluoroguanosine
  modified_base 11: mod_base = OTHER; note = 2'-fluorocytidine
  modified_base 12: mod_base = OTHER; note = 2'-O-methyladenosine
  modified_base 13: mod_base = cm
  modified_base 14: mod_base = OTHER; note = 2'-O-methyladenosine
  modified_base 15: mod_base = OTHER; note = 2'-O-methyladenosine
  modified_base 16: mod_base = cm
  modified_base 17: mod_base = um
  modified_base 18: mod_base = um
  modified_base 19: mod_base = cm
  modified_base 20: mod_base = um
  modified_base 21: mod_base = OTHER; note = 2'-O-methyladenosine
  source 1..21: mol_type = other RNA
ccacaaccagcacaacttcta

SEQ ID NO: 1262 - RNA, 21 nt, synthetic construct
  modified_base 1: mod_base = gm
  modified_base 1^2: mod_base = OTHER; note = phosphorothioate linkage
  modified_base 2: mod_base = OTHER; note = 2'-O-methyladenosine
  modified_base 3: mod_base = cm
  modified_base 4: mod_base = OTHER; note = 2'-O-methyladenosine
  modified_base 5: mod_base = OTHER; note = 2'-O-methyladenosine
  modified_base 6: mod_base = cm
  modified_base 7: mod_base = cm
  modified_base 8: mod_base = OTHER; note = 2'-O-methyladenosine
  modified_base 9: mod_base = OTHER; note = 2'-fluorocytidine
  modified_base 10: mod_base = OTHER; note = 2'-fluorouridine
  modified_base 11: mod_base = OTHER; note = 2'-fluorouridine
  modified_base 12: mod_base = um
  modified_base 13: mod_base = gm
  modified_base 14: mod_base = gm
  modified_base 15: mod_base = um
  modified_base 16: mod_base = gm
  modified_base 17: mod_base = OTHER; note = 2'-O-methyladenosine
  modified_base 18: mod_base = cm
  modified_base 19: mod_base = OTHER; note = 2'-O-methyladenosine
  modified_base 20: mod_base = OTHER; note = 2'-O-methyladenosine
  modified_base 21: mod_base = OTHER; note = 2'-O-methyladenosine
  source 1..21: mol_type = other RNA
gacaaccactttggtgacaaa

SEQ ID NO: 1263 - RNA, 21 nt, synthetic construct
  modified_base 1: mod_base = cm
  modified_base 1^2: mod_base = OTHER; note = phosphorothioate linkage
  modified_base 2: mod_base = um
  modified_base 3: mod_base = OTHER; note = 2'-O-methyladenosine
  modified_base 4: mod_base = cm
  modified_base 5: mod_base = OTHER; note = 2'-O-methyladenosine
  modified_base 6: mod_base = OTHER; note = 2'-O-methyladenosine
  modified_base 7: mod_base = cm
  modified_base 8: mod_base = cm
  modified_base 9: mod_base = OTHER; note = 2'-fluoroadenosine
  modified_base 10: mod_base = OTHER; note = 2'-fluoroadenosine
  modified_base 11: mod_base = OTHER; note = 2'-fluorocytidine
  modified_base 12: mod_base = OTHER; note = 2'-O-methyladenosine
  modified_base 13: mod_base = cm
  modified_base 14: mod_base = OTHER; note = 2'-O-methyladenosine
  modified_base 15: mod_base = OTHER; note = 2'-O-methyladenosine
  modified_base 16: mod_base = cm
  modified_base 17: mod_base = um
  modified_base 18: mod_base = um
  modified_base 19: mod_base = cm
  modified_base 20: mod_base = um
  modified_base 21: mod_base = OTHER; note = 2'-O-methyladenosine
  source 1..21: mol_type = other RNA
ctacaaccaacacaacttcta

SEQ ID NO: 1264 - RNA, 21 nt, synthetic construct
  modified_base 1: mod_base = OTHER; note = 2'-O-methyladenosine
  modified_base 1^2: mod_base = OTHER; note = phosphorothioate linkage
  modified_base 2: mod_base = cm
  modified_base 3: mod_base = cm
  modified_base 4: mod_base = um
  modified_base 5: mod_base = cm
  modified_base 6: mod_base = um
  modified_base 7: mod_base = gm
  modified_base 8: mod_base = cm
  modified_base 9: mod_base = OTHER; note = 2'-fluorouridine
  modified_base 10: mod_base = OTHER; note = 2'-fluorocytidine
  modified_base 11: mod_base = OTHER; note = 2'-fluorocytidine
  modified_base 12: mod_base = um
  modified_base 13: mod_base = OTHER; note = 2'-O-methyladenosine
  modified_base 14: mod_base = cm
  modified_base 15: mod_base = OTHER; note = 2'-O-methyladenosine
  modified_base 16: mod_base = OTHER; note = 2'-O-methyladenosine
  modified_base 17: mod_base = cm
  modified_base 18: mod_base = um
  modified_base 19: mod_base = OTHER; note = 2'-O-methyladenosine
  modified_base 20: mod_base = gm
  modified_base 21: mod_base = OTHER; note = 2'-O-methyladenosine
  source 1..21: mol_type = other RNA
acctctgctcctacaactaga

SEQ ID NO: 1265 - RNA, 21 nt, synthetic construct
  modified_base 1: mod_base = gm
  modified_base 1^2: mod_base = OTHER; note = phosphorothioate linkage
  modified_base 2: mod_base = cm
  modified_base 3: mod_base = um
  modified_base 4: mod_base = gm
  modified_base 5: mod_base = um
  modified_base 6: mod_base = um
  modified_base 7: mod_base = cm
  modified_base 8: mod_base = um
  modified_base 9: mod_base = OTHER; note = 2'-fluoroguanosine
  modified_base 10: mod_base = OTHER; note = 2'-fluorocytidine
  modified_base 11: mod_base = OTHER; note = 2'-fluoroguanosine
  modified_base 12: mod_base = OTHER; note = 2'-O-methyladenosine
  modified_base 13: mod_base = cm
  modified_base 14: mod_base = um
  modified_base 15: mod_base = OTHER; note = 2'-O-methyladenosine
  modified_base 16: mod_base = cm
  modified_base 17: mod_base = um
  modified_base 18: mod_base = OTHER; note = 2'-O-methyladenosine
  modified_base 19: mod_base = cm
  modified_base 20: mod_base = OTHER; note = 2'-O-methyladenosine
  modified_base 21: mod_base = OTHER; note = 2'-O-methyladenosine
  source 1..21: mol_type = other RNA
gctgttctgcgactactacaa

SEQ ID NO: 1266 - RNA, 21 nt, synthetic construct
  modified_base 1: mod_base = gm
  modified_base 1^2: mod_base = OTHER; note = phosphorothioate linkage
  modified_base 2: mod_base = cm
  modified_base 3: mod_base = um
  modified_base 4: mod_base = gm
  modified_base 5: mod_base = um
  modified_base 6: mod_base = um
  modified_base 7: mod_base = cm
  modified_base 8: mod_base = um
  modified_base 9: mod_base = OTHER; note = 2'-fluoroguanosine
  modified_base 10: mod_base = OTHER; note = 2'-fluorouridine
  modified_base 11: mod_base = OTHER; note = 2'-fluoroguanosine
  modified_base 12: mod_base = OTHER; note = 2'-O-methyladenosine
  modified_base 13: mod_base = cm
  modified_base 14: mod_base = um
  modified_base 15: mod_base = OTHER; note = 2'-O-methyladenosine
  modified_base 16: mod_base = cm
  modified_base 17: mod_base = um
  modified_base 18: mod_base = OTHER; note = 2'-O-methyladenosine
  modified_base 19: mod_base = cm
  modified_base 20: mod_base = OTHER; note = 2'-O-methyladenosine
  modified_base 21: mod_base = OTHER; note = 2'-O-methyladenosine
  source 1..21: mol_type = other RNA
gctgttctgtgactactacaa

SEQ ID NO: 1267 - RNA, 21 nt, synthetic construct
  modified_base 1: mod_base = OTHER; note = 2'-O-methyladenosine
  modified_base 1^2: mod_base = OTHER; note = phosphorothioate linkage
  modified_base 2: mod_base = cm
  modified_base 3: mod_base = cm
  modified_base 4: mod_base = OTHER; note = 2'-O-methyladenosine
  modified_base 5: mod_base = gm
  modified_base 6: mod_base = OTHER; note = 2'-O-methyladenosine
  modified_base 7: mod_base = um
  modified_base 8: mod_base = cm
  modified_base 9: mod_base = OTHER; note = 2'-fluoroadenosine
  modified_base 10: mod_base = OTHER; note = 2'-fluorouridine
  modified_base 11: mod_base = OTHER; note = 2'-fluorocytidine
  modified_base 12: mod_base = um
  modified_base 13: mod_base = um
  modified_base 14: mod_base = cm
  modified_base 15: mod_base = OTHER; note = 2'-O-methyladenosine
  modified_base 16: mod_base = OTHER; note = 2'-O-methyladenosine
  modified_base 17: mod_base = cm
  modified_base 18: mod_base = OTHER; note = 2'-O-methyladenosine
  modified_base 19: mod_base = OTHER; note = 2'-O-methyladenosine
  modified_base 20: mod_base = cm
  modified_base 21: mod_base = OTHER; note = 2'-O-methyladenosine
  source 1..21: mol_type = other RNA
accagatcatcttcaacaaca

SEQ ID NO: 1268 - RNA, 21 nt, synthetic construct
  modified_base 1: mod_base = gm
  modified_base 1^2: mod_base = OTHER; note = phosphorothioate linkage
  modified_base 2: mod_base = gm
  modified_base 3: mod_base = cm
  modified_base 4: mod_base = um
  modified_base 5: mod_base = cm
  modified_base 6: mod_base = um
  modified_base 7: mod_base = gm
  modified_base 8: mod_base = um
  modified_base 9: mod_base = OTHER; note = 2'-fluoroguanosine
  modified_base 10: mod_base = OTHER; note = 2'-fluoroguanosine
  modified_base 11: mod_base = OTHER; note = 2'-fluorouridine
  modified_base 12: mod_base = OTHER; note = 2'-O-methyladenosine
  modified_base 13: mod_base = OTHER; note = 2'-O-methyladenosine
  modified_base 14: mod_base = cm
  modified_base 15: mod_base = um
  modified_base 16: mod_base = um
  modified_base 17: mod_base = cm
  modified_base 18: mod_base = OTHER; note = 2'-O-methyladenosine
  modified_base 19: mod_base = OTHER; note = 2'-O-methyladenosine
  modified_base 20: mod_base = cm
  modified_base 21: mod_base = OTHER; note = 2'-O-methyladenosine
  source 1..21: mol_type = other RNA
ggctctgtggtaacttcaaca

SEQ ID NO: 1269 - RNA, 21 nt, synthetic construct
  modified_base 1: mod_base = gm
  modified_base 1^2: mod_base = OTHER; note = phosphorothioate linkage
  modified_base 2: mod_base = OTHER; note = 2'-O-methyladenosine
  modified_base 3: mod_base = gm
  modified_base 4: mod_base = cm
  modified_base 5: mod_base = gm
  modified_base 6: mod_base = um
  modified_base 7: mod_base = gm
  modified_base 8: mod_base = gm
  modified_base 9: mod_base = OTHER; note = 2'-fluoroadenosine
  modified_base 10: mod_base = OTHER; note = 2'-fluoroguanosine
  modified_base 11: mod_base = OTHER; note = 2'-fluoroadenosine
  modified_base 12: mod_base = OTHER; note = 2'-O-methyladenosine
  modified_base 13: mod_base = um
  modified_base 14: mod_base = gm
  modified_base 15: mod_base = OTHER; note = 2'-O-methyladenosine
  modified_base 16: mod_base = OTHER; note = 2'-O-methyladenosine
  modified_base 17: mod_base = OTHER; note = 2'-O-methyladenosine
  modified_base 18: mod_base = OTHER; note = 2'-O-methyladenosine
  modified_base 19: mod_base = gm
  modified_base 20: mod_base = um
  modified_base 21: mod_base = OTHER; note = 2'-O-methyladenosine
  source 1..21: mol_type = other RNA
gagcgtggagaatgaaaagta

SEQ ID NO: 1270 - RNA, 21 nt, synthetic construct
  modified_base 1: mod_base = gm
  modified_base 1^2: mod_base = OTHER; note = phosphorothioate linkage
  modified_base 2: mod_base = gm
  modified_base 3: mod_base = gm
  modified_base 4: mod_base = OTHER; note = 2'-O-methyladenosine
  modified_base 5: mod_base = gm
  modified_base 6: mod_base = OTHER; note = 2'-O-methyladenosine
  modified_base 7: mod_base = OTHER; note = 2'-O-methyladenosine
  modified_base 8: mod_base = um
  modified_base 9: mod_base = OTHER; note = 2'-fluoroguanosine
  modified_base 10: mod_base = OTHER; note = 2'-fluoroadenosine
  modified_base 11: mod_base = OTHER; note = 2'-fluoroadenosine
  modified_base 12: mod_base = OTHER; note = 2'-O-methyladenosine
  modified_base 13: mod_base = OTHER; note = 2'-O-methyladenosine
  modified_base 14: mod_base = gm
  modified_base 15: mod_base = um
  modified_base 16: mod_base = OTHER; note = 2'-O-methyladenosine
  modified_base 17: mod_base = um
  modified_base 18: mod_base = gm
  modified_base 19: mod_base = cm
  modified_base 20: mod_base = um
  modified_base 21: mod_base = OTHER; note = 2'-O-methyladenosine
  source 1..21: mol_type = other RNA
gggagaatgaaaagtatgcta

SEQ ID NO: 1271 - RNA, 21 nt, synthetic construct
  modified_base 1: mod_base = cm
  modified_base 1^2: mod_base = OTHER; note = phosphorothioate linkage
  modified_base 2: mod_base = um
  modified_base 3: mod_base = um
  modified_base 4: mod_base = cm
  modified_base 5: mod_base = um
  modified_base 6: mod_base = cm
  modified_base 7: mod_base = gm
  modified_base 8: mod_base = OTHER; note = 2'-O-methyladenosine
  modified_base 9: mod_base = OTHER; note = 2'-fluoroadenosine
  modified_base 10: mod_base = OTHER; note = 2'-fluorocytidine
  modified_base 11: mod_base = OTHER; note = 2'-fluorouridine
  modified_base 12: mod_base = gm
  modified_base 13: mod_base = cm
  modified_base 14: mod_base = OTHER; note = 2'-O-methyladenosine
  modified_base 15: mod_base = um
  modified_base 16: mod_base = gm
  modified_base 17: mod_base = um
  modified_base 18: mod_base = OTHER; note = 2'-O-methyladenosine
  modified_base 19: mod_base = um
  modified_base 20: mod_base = gm
  modified_base 21: mod_base = OTHER; note = 2'-O-methyladenosine
  source 1..21: mol_type = other RNA
cttctcgaactgcatgtatga

SEQ ID NO: 1272 - RNA, 21 nt, synthetic construct
  modified_base 1: mod_base = gm
  modified_base 1^2: mod_base = OTHER; note = phosphorothioate linkage
  modified_base 2: mod_base = cm
  modified_base 3: mod_base = um
  modified_base 4: mod_base = cm
  modified_base 5: mod_base = gm
  modified_base 6: mod_base = OTHER; note = 2'-O-methyladenosine
  modified_base 7: mod_base = OTHER; note = 2'-O-methyladenosine
  modified_base 8: mod_base = cm
  modified_base 9: mod_base = OTHER; note = 2'-fluorouridine
  modified_base 10: mod_base = OTHER; note = 2'-fluoroguanosine
  modified_base 11: mod_base = OTHER; note = 2'-fluorocytidine
  modified_base 12: mod_base = OTHER; note = 2'-O-methyladenosine
  modified_base 13: mod_base = um
  modified_base 14: mod_base = gm
  modified_base 15: mod_base = um
  modified_base 16: mod_base = OTHER; note = 2'-O-methyladenosine
  modified_base 17: mod_base = um
  modified_base 18: mod_base = gm
  modified_base 19: mod_base = OTHER; note = 2'-O-methyladenosine
  modified_base 20: mod_base = cm
  modified_base 21: mod_base = OTHER; note = 2'-O-methyladenosine
  source 1..21: mol_type = other RNA
gctcgaactgcatgtatgaca

SEQ ID NO: 1273 - RNA, 21 nt, synthetic construct
  modified_base 1: mod_base = cm
  modified_base 1^2: mod_base = OTHER; note = phosphorothioate linkage
  modified_base 2: mod_base = um
  modified_base 3: mod_base = cm
  modified_base 4: mod_base = gm
  modified_base 5: mod_base = OTHER; note = 2'-O-methyladenosine
  modified_base 6: mod_base = OTHER; note = 2'-O-methyladenosine
  modified_base 7: mod_base = cm
  modified_base 8: mod_base = um
  modified_base 9: mod_base = OTHER; note = 2'-fluoroguanosine
  modified_base 10: mod_base = OTHER; note = 2'-fluorocytidine
  modified_base 11: mod_base = OTHER; note = 2'-fluoroadenosine
  modified_base 12: mod_base = um
  modified_base 13: mod_base = gm
  modified_base 14: mod_base = um
  modified_base 15: mod_base = OTHER; note = 2'-O-methyladenosine
  modified_base 16: mod_base = um
  modified_base 17: mod_base = gm
  modified_base 18: mod_base = OTHER; note = 2'-O-methyladenosine
  modified_base 19: mod_base = cm
  modified_base 20: mod_base = OTHER; note = 2'-O-methyladenosine
  modified_base 21: mod_base = OTHER; note = 2'-O-methyladenosine
  source 1..21: mol_type = other RNA
ctcgaactgcatgtatgacaa

SEQ ID NO: 1274 - RNA, 21 nt, synthetic construct
  modified_base 1: mod_base = cm
  modified_base 1^2: mod_base = OTHER; note = phosphorothioate linkage
  modified_base 2: mod_base = cm
  modified_base 3: mod_base = OTHER; note = 2'-O-methyladenosine
  modified_base 4: mod_base = cm
  modified_base 5: mod_base = um
  modified_base 6: mod_base = gm
  modified_base 7: mod_base = um
  modified_base 8: mod_base = um
  modified_base 9: mod_base = OTHER; note = 2'-fluorocytidine
  modified_base 10: mod_base = OTHER; note = 2'-fluorouridine
  modified_base 11: mod_base = OTHER; note = 2'-fluoroguanosine
  modified_base 12: mod_base = um
  modified_base 13: mod_base = gm
  modified_base 14: mod_base = OTHER; note = 2'-O-methyladenosine
  modified_base 15: mod_base = cm
  modified_base 16: mod_base = um
  modified_base 17: mod_base = OTHER; note = 2'-O-methyladenosine
  modified_base 18: mod_base = cm
  modified_base 19: mod_base = um
  modified_base 20: mod_base = OTHER; note = 2'-O-methyladenosine
  modified_base 21: mod_base = OTHER; note = 2'-O-methyladenosine
  source 1..21: mol_type = other RNA
ccactgttctgtgactactaa

SEQ ID NO: 1275 - RNA, 21 nt, synthetic construct
  modified_base 1: mod_base = cm
  modified_base 1^2: mod_base = OTHER; note = phosphorothioate linkage
  modified_base 2: mod_base = OTHER; note = 2'-O-methyladenosine
  modified_base 3: mod_base = cm
  modified_base 4: mod_base = um
  modified_base 5: mod_base = gm
  modified_base 6: mod_base = um
  modified_base 7: mod_base = um
  modified_base 8: mod_base = cm
  modified_base 9: mod_base = OTHER; note = 2'-fluorouridine
  modified_base 10: mod_base = OTHER; note = 2'-fluoroguanosine
  modified_base 11: mod_base = OTHER; note = 2'-fluorouridine
  modified_base 12: mod_base = gm
  modified_base 13: mod_base = OTHER; note = 2'-O-methyladenosine
  modified_base 14: mod_base = cm
  modified_base 15: mod_base = um
  modified_base 16: mod_base = OTHER; note = 2'-O-methyladenosine
  modified_base 17: mod_base = cm
  modified_base 18: mod_base = um
  modified_base 19: mod_base = OTHER; note = 2'-O-methyladenosine
  modified_base 20: mod_base = cm
  modified_base 21: mod_base = OTHER; note = 2'-O-methyladenosine
  source 1..21: mol_type = other RNA
cactgttctgtgactactaca

SEQ ID NO: 1276 - RNA, 21 nt, synthetic construct
  modified_base 1: mod_base = cm
  modified_base 1^2: mod_base = OTHER; note = phosphorothioate linkage
  modified_base 2: mod_base = cm
  modified_base 3: mod_base = um
  modified_base 4: mod_base = um
  modified_base 5: mod_base = cm
  modified_base 6: mod_base = um
  modified_base 7: mod_base = um
  modified_base 8: mod_base = cm
  modified_base 9: mod_base = OTHER; note = 2'-fluorouridine
  modified_base 10: mod_base = OTHER; note = 2'-fluorocytidine
  modified_base 11: mod_base = OTHER; note = 2'-fluoroguanosine
  modified_base 12: mod_base = OTHER; note = 2'-O-methyladenosine
  modified_base 13: mod_base = OTHER; note = 2'-O-methyladenosine
  modified_base 14: mod_base = cm
  modified_base 15: mod_base = um
  modified_base 16: mod_base = OTHER; note = 2'-O-methylinosine
  modified_base 17: mod_base = cm
  modified_base 18: mod_base = OTHER; note = 2'-O-methyladenosine
  modified_base 19: mod_base = um
  modified_base 20: mod_base = gm
  modified_base 21: mod_base = um
  source 1..21: mol_type = other RNA
ccttcttctcgaactncatgt

SEQ ID NO: 1277 - RNA, 21 nt, synthetic construct
  modified_base 1: mod_base = cm
  modified_base 1^2: mod_base = OTHER; note = phosphorothioate linkage
  modified_base 2: mod_base = cm
  modified_base 3: mod_base = OTHER; note = 2'-O-methyladenosine
  modified_base 4: mod_base = cm
  modified_base 5: mod_base = cm
  modified_base 6: mod_base = cm
  modified_base 7: mod_base = OTHER; note = 2'-O-methyladenosine
  modified_base 8: mod_base = um
  modified_base 9: mod_base = OTHER; note = 2'-fluoroguanosine
  modified_base 10: mod_base = OTHER; note = 2'-fluorouridine
  modified_base 11: mod_base = OTHER; note = 2'-fluoroguanosine
  modified_base 12: mod_base = cm
  modified_base 13: mod_base = um
  modified_base 14: mod_base = OTHER; note = 2'-O-methyladenosine
  modified_base 15: mod_base = cm
  modified_base 16: mod_base = OTHER; note = 2'-O-methyladenosine
  modified_base 17: mod_base = OTHER; note = 2'-O-methyladenosine
  modified_base 18: mod_base = cm
  modified_base 19: mod_base = um
  modified_base 20: mod_base = OTHER; note = 2'-O-methyladenosine
  modified_base 21: mod_base = um
  source 1..21: mol_type = other RNA
ccacccatgtgctacaactat

SEQ ID NO: 1278 - RNA, 21 nt, synthetic construct
  modified_base 1: mod_base = cm
  modified_base 1^2: mod_base = OTHER; note = phosphorothioate linkage
  modified_base 2: mod_base = um
  modified_base 3: mod_base = gm
  modified_base 4: mod_base = cm
  modified_base 5: mod_base = um
  modified_base 6: mod_base = OTHER; note = 2'-O-methyladenosine
  modified_base 7: mod_base = OTHER; note = 2'-fluorocytidine
  modified_base 8: mod_base = OTHER; note = 2'-O-methyladenosine
  modified_base 9: mod_base = OTHER; note = 2'-fluoroadenosine
  modified_base 10: mod_base = cm
  modified_base 11: mod_base = OTHER; note = 2'-fluorouridine
  modified_base 12: mod_base = OTHER; note = 2'-O-methyladenosine
  modified_base 13: mod_base = um
  modified_base 14: mod_base = gm
  modified_base 15: mod_base = OTHER; note = 2'-O-methyladenosine
  modified_base 16: mod_base = OTHER; note = 2'-O-methylinosine
  modified_base 17: mod_base = OTHER; note = 2'-O-methyladenosine
  modified_base 18: mod_base = um
  modified_base 19: mod_base = cm
  modified_base 20: mod_base = cm
  modified_base 21: mod_base = OTHER; note = 2'-O-methyladenosine
  source 1..21: mol_type = other RNA
ctgctacaactatganatcca

SEQ ID NO: 1279 - RNA, 21 nt, synthetic construct
  modified_base 1: mod_base = cm
  modified_base 1^2: mod_base = OTHER; note = phosphorothioate linkage
  modified_base 2: mod_base = gm
  modified_base 3: mod_base = OTHER; note = 2'-O-methyladenosine
  modified_base 4: mod_base = gm
  modified_base 5: mod_base = OTHER; note = 2'-O-methyladenosine
  modified_base 6: mod_base = um
  modified_base 7: mod_base = OTHER; note = 2'-fluorocytidine
  modified_base 8: mod_base = OTHER; note = 2'-O-methyladenosine
  modified_base 9: mod_base = OTHER; note = 2'-fluorouridine
  modified_base 10: mod_base = cm
  modified_base 11: mod_base = OTHER; note = 2'-fluorouridine
  modified_base 12: mod_base = um
  modified_base 13: mod_base = cm
  modified_base 14: mod_base = OTHER; note = 2'-O-methyladenosine
  modified_base 15: mod_base = OTHER; note = 2'-O-methyladenosine
  modified_base 16: mod_base = cm
  modified_base 17: mod_base = OTHER; note = 2'-O-methyladenosine
  modified_base 18: mod_base = OTHER; note = 2'-O-methyladenosine
  modified_base 19: mod_base = cm
  modified_base 20: mod_base = OTHER; note = 2'-O-methyladenosine
  modified_base 21: mod_base = OTHER; note = 2'-O-methyladenosine
  source 1..21: mol_type = other RNA
cgagatcatcttcaacaacaa

SEQ ID NO: 1280 - RNA, 21 nt, synthetic construct
  modified_base 1: mod_base = cm
  modified_base 1^2: mod_base = OTHER; note = phosphorothioate linkage
  modified_base 2: mod_base = OTHER; note = 2'-O-methyladenosine
  modified_base 3: mod_base = cm
  modified_base 4: mod_base = um
  modified_base 5: mod_base = gm
  modified_base 6: mod_base = um
  modified_base 7: mod_base = OTHER; note = 2'-fluorouridine
  modified_base 8: mod_base = cm
  modified_base 9: mod_base = OTHER; note = 2'-fluorouridine
  modified_base 10: mod_base = gm
  modified_base 11: mod_base = OTHER; note = 2'-fluorouridine
  modified_base 12: mod_base = gm
  modified_base 13: mod_base = OTHER; note = 2'-O-methyladenosine
  modified_base 14: mod_base = cm
  modified_base 15: mod_base = um
  modified_base 16: mod_base = OTHER; note = 2'-O-methyladenosine
  modified_base 17: mod_base = cm
  modified_base 18: mod_base = um
  modified_base 19: mod_base = OTHER; note = 2'-O-methyladenosine
  modified_base 20: mod_base = cm
  modified_base 21: mod_base = OTHER; note = 2'-O-methyladenosine
  source 1..21: mol_type = other RNA
cactgttctgtgactactaca

SEQ ID NO: 1281 - RNA, 21 nt, synthetic construct
  modified_base 1: mod_base = gm
  modified_base 1^2: mod_base = OTHER; note = phosphorothioate linkage
  modified_base 2: mod_base = OTHER; note = 2'-O-methyladenosine
  modified_base 3: mod_base = cm
  modified_base 4: mod_base = um
  modified_base 5: mod_base = gm
  modified_base 6: mod_base = um
  modified_base 7: mod_base = OTHER; note = 2'-fluorouridine
  modified_base 8: mod_base = cm
  modified_base 9: mod_base = OTHER; note = 2'-fluorouridine
  modified_base 10: mod_base = gm
  modified_base 11: mod_base = OTHER; note = 2'-fluorouridine
  modified_base 12: mod_base = gm
  modified_base 13: mod_base = OTHER; note = 2'-O-methyladenosine
  modified_base 14: mod_base = cm
  modified_base 15: mod_base = um
  modified_base 16: mod_base = OTHER; note = 2'-O-methyladenosine
  modified_base 17: mod_base = cm
  modified_base 18: mod_base = um
  modified_base 19: mod_base = OTHER; note = 2'-O-methyladenosine
  modified_base 20: mod_base = cm
  modified_base 21: mod_base = OTHER; note = 2'-O-methyladenosine
  source 1..21: mol_type = other RNA
gactgttctgtgactactaca

SEQ ID NO: 1282 - RNA, 21 nt, synthetic construct
  modified_base 1: mod_base = um
  modified_base 1^2: mod_base = OTHER; note = phosphorothioate linkage
  modified_base 2: mod_base = gm
  modified_base 3: mod_base = gm
  modified_base 4: mod_base = gm
  modified_base 5: mod_base = gm
  modified_base 6: mod_base = OTHER; note = 2'-O-methyladenosine
  modified_base 7: mod_base = OTHER; note = 2'-O-methyladenosine
  modified_base 8: mod_base = gm
  modified_base 9: mod_base = OTHER; note = 2'-fluorouridine
  modified_base 10: mod_base = OTHER; note = 2'-fluoroguanosine
  modified_base 11: mod_base = OTHER; note = 2'-fluorouridine
  modified_base 12: mod_base = um
  modified_base 13: mod_base = cm
  modified_base 14: mod_base = cm
  modified_base 15: mod_base = um
  modified_base 16: mod_base = OTHER; note = 2'-O-methylinosine
  modified_base 17: mod_base = OTHER; note = 2'-O-methyladenosine
  modified_base 18: mod_base = OTHER; note = 2'-O-methyladenosine
  modified_base 19: mod_base = cm
  modified_base 20: mod_base = cm
  modified_base 21: mod_base = OTHER; note = 2'-O-methyladenosine
  source 1..21: mol_type = other RNA
tggggaagtgttcctnaacca

SEQ ID NO: 1283 - RNA, 21 nt, synthetic construct
  modified_base 1: mod_base = gm
  modified_base 1^2: mod_base = OTHER; note = phosphorothioate linkage
  modified_base 2: mod_base = gm
  modified_base 3: mod_base = OTHER; note = 2'-O-methyladenosine
  modified_base 4: mod_base = cm
  modified_base 5: mod_base = OTHER; note = 2'-O-methyladenosine
  modified_base 6: mod_base = um
  modified_base 7: mod_base = cm
  modified_base 8: mod_base = OTHER; note = 2'-O-methyladenosine
  modified_base 9: mod_base = OTHER; note = 2'-fluorocytidine
  modified_base 10: mod_base = OTHER; note = 2'-fluorocytidine
  modified_base 11: mod_base = OTHER; note = 2'-fluorouridine
  modified_base 12: mod_base = gm
  modified_base 13: mod_base = cm
  modified_base 14: mod_base = OTHER; note = 2'-O-methyladenosine
  modified_base 15: mod_base = gm
  modified_base 16: mod_base = um
  modified_base 17: mod_base = OTHER; note = 2'-O-methylinosine
  modified_base 18: mod_base = um
  modified_base 19: mod_base = um
  modified_base 20: mod_base = gm
  modified_base 21: mod_base = OTHER; note = 2'-O-methyladenosine
  source 1..21: mol_type = other RNA
ggacatcacctgcagtnttga

SEQ ID NO: 1284 - RNA, 21 nt, synthetic construct
  modified_base 1: mod_base = um
  modified_base 1^2: mod_base = OTHER; note = phosphorothioate linkage
  modified_base 2: mod_base = gm
  modified_base 3: mod_base = um
  modified_base 4: mod_base = gm
  modified_base 5: mod_base = gm
  modified_base 6: mod_base = gm
  modified_base 7: mod_base = OTHER; note = 2'-O-methyladenosine
  modified_base 8: mod_base = OTHER; note = 2'-O-methyladenosine
  modified_base 9: mod_base = OTHER; note = 2'-fluorocytidine
  modified_base 10: mod_base = OTHER; note = 2'-fluorouridine
  modified_base 11: mod_base = OTHER; note = 2'-fluorouridine
  modified_base 12: mod_base = cm
  modified_base 13: mod_base = gm
  modified_base 14: mod_base = OTHER; note = 2'-O-methyladenosine
  modified_base 15: mod_base = cm
  modified_base 16: mod_base = OTHER; note = 2'-O-methylinosine
  modified_base 17: mod_base = OTHER; note = 2'-O-methyladenosine
  modified_base 18: mod_base = cm
  modified_base 19: mod_base = OTHER; note = 2'-O-methyladenosine
  modified_base 20: mod_base = um
  modified_base 21: mod_base = OTHER; note = 2'-O-methyladenosine
  source 1..21: mol_type = other RNA
tgtgggaacttcgacnacata

SEQ ID NO: 1285 - RNA, 21 nt, synthetic construct
  modified_base 1: mod_base = gm
  modified_base 1^2: mod_base = OTHER; note = phosphorothioate linkage
  modified_base 2: mod_base = um
  modified_base 3: mod_base = cm
  modified_base 4: mod_base = um
  modified_base 5: mod_base = um
  modified_base 6: mod_base = um
  modified_base 7: mod_base = gm
  modified_base 8: mod_base = OTHER; note = 2'-O-methyladenosine
  modified_base 9: mod_base = OTHER; note = 2'-fluorouridine
  modified_base 10: mod_base = OTHER; note = 2'-fluoroguanosine
  modified_base 11: mod_base = OTHER; note = 2'-fluoroadenosine
  modified_base 12: mod_base = gm
  modified_base 13: mod_base = gm
  modified_base 14: mod_base = OTHER; note = 2'-O-methyladenosine
  modified_base 15: mod_base = cm
  modified_base 16: mod_base = OTHER; note = 2'-O-methyladenosine
  modified_base 17: mod_base = OTHER; note = 2'-O-methyladenosine
  modified_base 18: mod_base = gm
  modified_base 19: mod_base = OTHER; note = 2'-O-methyladenosine
  modified_base 20: mod_base = um
  modified_base 21: mod_base = OTHER; note = 2'-O-methyladenosine
  source 1..21: mol_type = other RNA
gtctttgatgaggacaagata

SEQ ID NO: 1286 - RNA, 21 nt, synthetic construct
  modified_base 1: mod_base = gm
  modified_base 1^2: mod_base = OTHER; note = phosphorothioate linkage
  modified_base 2: mod_base = gm
  modified_base 3: mod_base = OTHER; note = 2'-O-methyladenosine
  modified_base 4: mod_base = cm
  modified_base 5: mod_base = gm
  modified_base 6: mod_base = um
  modified_base 7: mod_base = cm
  modified_base 8: mod_base = OTHER; note = 2'-O-methyladenosine
  modified_base 9: mod_base = OTHER; note = 2'-fluorouridine
  modified_base 10: mod_base = OTHER; note = 2'-fluorocytidine
  modified_base 11: mod_base = OTHER; note = 2'-fluorouridine
  modified_base 12: mod_base = OTHER; note = 2'-O-methyladenosine
  modified_base 13: mod_base = cm
  modified_base 14: mod_base = cm
  modified_base 15: mod_base = OTHER; note = 2'-O-methyladenosine
  modified_base 16: mod_base = cm
  modified_base 17: mod_base = OTHER; note = 2'-O-methyladenosine
  modified_base 18: mod_base = cm
  modified_base 19: mod_base = OTHER; note = 2'-O-methylinosine
  modified_base 20: mod_base = OTHER; note = 2'-O-methyladenosine
  modified_base 21: mod_base = OTHER; note = 2'-O-methyladenosine
  source 1..21: mol_type = other RNA
ggacgtcatctaccacacnaa

SEQ ID NO: 1287 - RNA, 21 nt, synthetic construct
  modified_base 1: mod_base = cm
  modified_base 1^2: mod_base = OTHER; note = phosphorothioate linkage
  modified_base 2: mod_base = um
  modified_base 3: mod_base = gm
  modified_base 4: mod_base = cm
  modified_base 5: mod_base = um
  modified_base 6: mod_base = OTHER; note = 2'-O-methyladenosine
  modified_base 7: mod_base = cm
  modified_base 8: mod_base = OTHER; note = 2'-O-methyladenosine
  modified_base 9: mod_base = OTHER; note = 2'-fluoroadenosine
  modified_base 10: mod_base = OTHER; note = 2'-fluorocytidine
  modified_base 11: mod_base = OTHER; note = 2'-fluorouridine
  modified_base 12: mod_base = OTHER; note = 2'-O-methyladenosine
  modified_base 13: mod_base = um
  modified_base 14: mod_base = gm
  modified_base 15: mod_base = OTHER; note = 2'-O-methyladenosine
  modified_base 16: mod_base = OTHER; note = 2'-O-methylinosine
  modified_base 17: mod_base = OTHER; note = 2'-O-methyladenosine
  modified_base 18: mod_base = um
  modified_base 19: mod_base = cm
  modified_base 20: mod_base = cm
  modified_base 21: mod_base = OTHER; note = 2'-O-methyladenosine
  source 1..21: mol_type = other RNA
ctgctacaactatganatcca

SEQ ID NO: 1288 - RNA, 21 nt, synthetic construct
  modified_base 1: mod_base = gm
  modified_base 1^2: mod_base = OTHER; note = phosphorothioate linkage
  modified_base 2: mod_base = cm
  modified_base 3: mod_base = OTHER; note = 2'-O-methyladenosine
  modified_base 4: mod_base = cm
  modified_base 5: mod_base = cm
  modified_base 6: mod_base = um
  modified_base 7: mod_base = cm
  modified_base 8: mod_base = cm
  modified_base 9: mod_base = OTHER; note = 2'-fluorouridine
  modified_base 10: mod_base = OTHER; note = 2'-fluorocytidine
  modified_base 11: mod_base = OTHER; note = 2'-fluorouridine
  modified_base 12: mod_base = um
  modified_base 13: mod_base = gm
  modified_base 14: mod_base = OTHER; note = 2'-O-methylinosine
  modified_base 15: mod_base = cm
  modified_base 16: mod_base = OTHER; note = 2'-O-methyladenosine
  modified_base 17: mod_base = gm
  modified_base 18: mod_base = OTHER; note = 2'-O-methyladenosine
  modified_base 19: mod_base = OTHER; note = 2'-O-methyladenosine
  modified_base 20: mod_base = OTHER; note = 2'-O-methyladenosine
  modified_base 21: mod_base = um
  source 1..21: mol_type = other RNA
gcacctcctcttgncagaaat

SEQ ID NO: 1289 - RNA, 21 nt, synthetic construct
  modified_base 1: mod_base = OTHER; note = 2'-O-methyladenosine
  modified_base 1^2: mod_base = OTHER; note = phosphorothioate linkage
  modified_base 2: mod_base = cm
  modified_base 3: mod_base = gm
  modified_base 4: mod_base = OTHER; note = 2'-O-methyladenosine
  modified_base 5: mod_base = gm
  modified_base 6: mod_base = OTHER; note = 2'-O-methyladenosine
  modified_base 7: mod_base = um
  modified_base 8: mod_base = cm
  modified_base 9: mod_base = OTHER; note = 2'-fluoroadenosine
  modified_base 10: mod_base = OTHER; note = 2'-fluorouridine
  modified_base 11: mod_base = OTHER; note = 2'-fluorocytidine
  modified_base 12: mod_base = um
  modified_base 13: mod_base = um
  modified_base 14: mod_base = cm
  modified_base 15: mod_base = OTHER; note = 2'-O-methyladenosine
  modified_base 16: mod_base = OTHER; note = 2'-O-methyladenosine
  modified_base 17: mod_base = cm
  modified_base 18: mod_base = OTHER; note = 2'-O-methyladenosine
  modified_base 19: mod_base = OTHER; note = 2'-O-methyladenosine
  modified_base 20: mod_base = cm
  modified_base 21: mod_base = OTHER; note = 2'-O-methyladenosine
  source 1..21: mol_type = other RNA
acgagatcatcttcaacaaca

SEQ ID NO: 1290 - RNA, 21 nt, synthetic construct
  modified_base 1: mod_base = cm
  modified_base 1^2: mod_base = OTHER; note = phosphorothioate linkage
  modified_base 2: mod_base = gm
  modified_base 3: mod_base = OTHER; note = 2'-O-methyladenosine
  modified_base 4: mod_base = gm
  modified_base 5: mod_base = OTHER; note = 2'-O-methyladenosine
  modified_base 6: mod_base = um
  modified_base 7: mod_base = cm
  modified_base 8: mod_base = OTHER; note = 2'-O-methyladenosine
  modified_base 9: mod_base = OTHER; note = 2'-fluorouridine
  modified_base 10: mod_base = OTHER; note = 2'-fluorocytidine
  modified_base 11: mod_base = OTHER; note = 2'-fluorouridine
  modified_base 12: mod_base = um
  modified_base 13: mod_base = cm
  modified_base 14: mod_base = OTHER; note = 2'-O-methyladenosine
  modified_base 15: mod_base = OTHER; note = 2'-O-methyladenosine
  modified_base 16: mod_base = cm
  modified_base 17: mod_base = OTHER; note = 2'-O-methyladenosine
  modified_base 18: mod_base = OTHER; note = 2'-O-methyladenosine
  modified_base 19: mod_base = cm
  modified_base 20: mod_base = OTHER; note = 2'-O-methyladenosine
  modified_base 21: mod_base = OTHER; note = 2'-O-methyladenosine
  source 1..21: mol_type = other RNA
cgagatcatcttcaacaacaa

SEQ ID NO: 1291 - RNA, 21 nt, synthetic construct
  modified_base 1: mod_base = gm
  modified_base 1^2: mod_base = OTHER; note = phosphorothioate linkage
  modified_base 2: mod_base = cm
  modified_base 3: mod_base = OTHER; note = 2'-O-methyladenosine
  modified_base 4: mod_base = OTHER; note = 2'-O-methyladenosine
  modified_base 5: mod_base = gm
  modified_base 6: mod_base = gm
  modified_base 7: mod_base = OTHER; note = 2'-O-methyladenosine
  modified_base 8: mod_base = OTHER; note = 2'-O-methyladenosine
  modified_base 9: mod_base = OTHER; note = 2'-fluoroadenosine
  modified_base 10: mod_base = OTHER; note = 2'-fluorocytidine
  modified_base 11: mod_base = OTHER; note = 2'-fluorocytidine
  modified_base 12: mod_base = um
  modified_base 13: mod_base = OTHER; note = 2'-O-methyladenosine
  modified_base 14: mod_base = cm
  modified_base 15: mod_base = OTHER; note = 2'-O-methyladenosine
  modified_base 16: mod_base = OTHER; note = 2'-O-methyladenosine
  modified_base 17: mod_base = cm
  modified_base 18: mod_base = OTHER; note = 2'-O-methyladenosine
  modified_base 19: mod_base = OTHER; note = 2'-O-methyladenosine
  modified_base 20: mod_base = cm
  modified_base 21: mod_base = OTHER; note = 2'-O-methyladenosine
  source 1..21: mol_type = other RNA
gcaaggaaacctacaacaaca

SEQ ID NO: 1292 - RNA, 21 nt, synthetic construct
  modified_base 1: mod_base = gm
  modified_base 1^2: mod_base = OTHER; note = phosphorothioate linkage
  modified_base 2: mod_base = cm
  modified_base 3: mod_base = OTHER; note = 2'-O-methyladenosine
  modified_base 4: mod_base = OTHER; note = 2'-O-methyladenosine
  modified_base 5: mod_base = gm
  modified_base 6: mod_base = gm
  modified_base 7: mod_base = OTHER; note = 2'-fluoroadenosine
  modified_base 8: mod_base = OTHER; note = 2'-O-methyladenosine
  modified_base 9: mod_base = OTHER; note = 2'-fluoroadenosine
  modified_base 10: mod_base = cm
  modified_base 11: mod_base = OTHER; note = 2'-fluorocytidine
  modified_base 12: mod_base = um
  modified_base 13: mod_base = OTHER; note = 2'-O-methyladenosine
  modified_base 14: mod_base = cm
  modified_base 15: mod_base = OTHER; note = 2'-O-methyladenosine
  modified_base 16: mod_base = OTHER; note = 2'-O-methyladenosine
  modified_base 17: mod_base = cm
  modified_base 18: mod_base = OTHER; note = 2'-O-methyladenosine
  modified_base 19: mod_base = OTHER; note = 2'-O-methyladenosine
  modified_base 20: mod_base = cm
  modified_base 21: mod_base = OTHER; note = 2'-O-methyladenosine
  source 1..21: mol_type = other RNA
gcaaggaaacctacaacaaca

SEQ ID NO: 1293 - RNA, 21 nt, synthetic construct
  modified_base 1: mod_base = gm
  modified_base 1^2: mod_base = OTHER; note = phosphorothioate linkage
  modified_base 2: mod_base = cm
  modified_base 3: mod_base = um
  modified_base 4: mod_base = gm
  modified_base 5: mod_base = OTHER; note = 2'-O-methyladenosine
  modified_base 6: mod_base = um
  modified_base 7: mod_base = OTHER; note = 2'-fluorouridine
  modified_base 8: mod_base = um
  modified_base 9: mod_base = OTHER; note = 2'-fluoroguanosine
  modified_base 10: mod_base = cm
  modified_base 11: mod_base = OTHER; note = 2'-fluorocytidine
  modified_base 12: mod_base = um
  modified_base 13: mod_base = gm
  modified_base 14: mod_base = OTHER; note = 2'-O-methyladenosine
  modified_base 15: mod_base = OTHER; note = 2'-O-methyladenosine
  modified_base 16: mod_base = cm
  modified_base 17: mod_base = OTHER; note = 2'-O-methyladenosine
  modified_base 18: mod_base = OTHER; note = 2'-O-methyladenosine
  modified_base 19: mod_base = gm
  modified_base 20: mod_base = OTHER; note = 2'-O-methyladenosine
  modified_base 21: mod_base = OTHER; note = 2'-O-methyladenosine
  source 1..21: mol_type = other RNA
gctgatttgcctgaacaagaa

SEQ ID NO: 1294 - RNA, 21 nt, synthetic construct
  modified_base 1: mod_base = gm
  modified_base 1^2: mod_base = OTHER; note = phosphorothioate linkage
  modified_base 2: mod_base = cm
  modified_base 3: mod_base = um
  modified_base 4: mod_base = gm
  modified_base 5: mod_base = OTHER; note = 2'-O-methyladenosine
  modified_base 6: mod_base = um
  modified_base 7: mod_base = OTHER; note = 2'-fluorouridine
  modified_base 8: mod_base = um
  modified_base 9: mod_base = OTHER; note = 2'-fluoroguanosine
  modified_base 10: mod_base = cm
  modified_base 11: mod_base = OTHER; note = 2'-fluorocytidine
  modified_base 12: mod_base = um
  modified_base 13: mod_base = gm
  modified_base 14: mod_base = OTHER; note = 2'-O-methyl-2-aminoadenosine
  modified_base 15: mod_base = OTHER; note = 2'-O-methyladenosine
  modified_base 16: mod_base = cm
  modified_base 17: mod_base = OTHER; note = 2'-O-methyladenosine
  modified_base 18: mod_base = OTHER; note = 2'-O-methyladenosine
  modified_base 19: mod_base = gm
  modified_base 20: mod_base = OTHER; note = 2'-O-methyladenosine
  modified_base 21: mod_base = OTHER; note = 2'-O-methyladenosine
  source 1..21: mol_type = other RNA
gctgatttgcctgnacaagaa

SEQ ID NO: 1295 - RNA, 21 nt, synthetic construct
  modified_base 1: mod_base = gm
  modified_base 1^2: mod_base = OTHER; note = phosphorothioate linkage
  modified_base 2: mod_base = gm
  modified_base 3: mod_base = cm
  modified_base 4: mod_base = um
  modified_base 5: mod_base = gm
  modified_base 6: mod_base = OTHER; note = 2'-O-methyladenosine
  modified_base 7: mod_base = OTHER; note = 2'-fluorouridine
  modified_base 8: mod_base = um
  modified_base 9: mod_base = OTHER; note = 2'-fluorouridine
  modified_base 10: mod_base = gm
  modified_base 11: mod_base = OTHER; note = 2'-fluorocytidine
  modified_base 12: mod_base = cm
  modified_base 13: mod_base = um
  modified_base 14: mod_base = gm
  modified_base 15: mod_base = OTHER; note = 2'-O-methyladenosine
  modified_base 16: mod_base = OTHER; note = 2'-O-methyladenosine
  modified_base 17: mod_base = cm
  modified_base 18: mod_base = OTHER; note = 2'-O-methyladenosine
  modified_base 19: mod_base = OTHER; note = 2'-O-methyladenosine
  modified_base 20: mod_base = gm
  modified_base 21: mod_base = OTHER; note = 2'-O-methyladenosine
  source 1..21: mol_type = other RNA
ggctgatttgcctgaacaaga

SEQ ID NO: 1296 - RNA, 21 nt, synthetic construct
  modified_base 1: mod_base = gm
  modified_base 1^2: mod_base = OTHER; note = phosphorothioate linkage
  modified_base 2: mod_base = gm
  modified_base 3: mod_base = OTHER; note = 2'-O-methyladenosine
  modified_base 4: mod_base = cm
  modified_base 5: mod_base = cm
  modified_base 6: mod_base = OTHER; note = 2'-O-methyladenosine
  modified_base 7: mod_base = OTHER; note = 2'-fluoroguanosine
  modified_base 8: mod_base = cm
  modified_base 9: mod_base = OTHER; note = 2'-fluoroadenosine
  modified_base 10: mod_base = um
  modified_base 11: mod_base = OTHER; note = 2'-fluorocytidine
  modified_base 12: mod_base = um
  modified_base 13: mod_base = um
  modified_base 14: mod_base = cm
  modified_base 15: mod_base = OTHER; note = 2'-O-methyladenosine
  modified_base 16: mod_base = um
  modified_base 17: mod_base = cm
  modified_base 18: mod_base = OTHER; note = 2'-O-methyladenosine
  modified_base 19: mod_base = OTHER; note = 2'-O-methyladenosine
  modified_base 20: mod_base = cm
  modified_base 21: mod_base = OTHER; note = 2'-O-methyladenosine
  source 1..21: mol_type = other RNA
ggaccagcatcttcatcaaca

SEQ ID NO: 1297 - RNA, 21 nt, synthetic construct
  modified_base 1: mod_base = cm
  modified_base 1^2: mod_base = OTHER; note = phosphorothioate linkage
  modified_base 2: mod_base = gm
  modified_base 3: mod_base = OTHER; note = 2'-O-methyladenosine
  modified_base 4: mod_base = gm
  modified_base 5: mod_base = OTHER; note = 2'-O-methyladenosine
  modified_base 6: mod_base = um
  modified_base 7: mod_base = cm
  modified_base 8: mod_base = OTHER; note = 2'-O-methyladenosine
  modified_base 9: mod_base = OTHER; note = 2'-fluorouridine
  modified_base 10: mod_base = OTHER; note = 2'-fluorocytidine
  modified_base 11: mod_base = OTHER; note = 2'-fluorouridine
  modified_base 12: mod_base = um
  modified_base 13: mod_base = cm
  modified_base 14: mod_base = OTHER; note = 2'-O-methyl-2-aminoadenosine
  modified_base 15: mod_base = OTHER; note = 2'-O-methyladenosine
  modified_base 16: mod_base = cm
  modified_base 17: mod_base = OTHER; note = 2'-O-methyladenosine
  modified_base 18: mod_base = OTHER; note = 2'-O-methyladenosine
  modified_base 19: mod_base = cm
  modified_base 20: mod_base = OTHER; note = 2'-O-methyladenosine
  modified_base 21: mod_base = OTHER; note = 2'-O-methyladenosine
  source 1..21: mol_type = other RNA
cgagatcatcttcnacaacaa

SEQ ID NO: 1298 - RNA, 21 nt, synthetic construct
  modified_base 1: mod_base = cm
  modified_base 1^2: mod_base = OTHER; note = phosphorothioate linkage
  modified_base 2: mod_base = OTHER; note = 2'-O-methyladenosine
  modified_base 3: mod_base = um
  modified_base 4: mod_base = cm
  modified_base 5: mod_base = um
  modified_base 6: mod_base = um
  modified_base 7: mod_base = um
  modified_base 8: mod_base = gm
  modified_base 9: mod_base = OTHER; note = 2'-fluoroadenosine
  modified_base 10: mod_base = OTHER; note = 2'-fluorouridine
  modified_base 11: mod_base = OTHER; note = 2'-fluoroguanosine
  modified_base 12: mod_base = OTHER; note = 2'-O-methyladenosine
  modified_base 13: mod_base = gm
  modified_base 14: mod_base = gm
  modified_base 15: mod_base = OTHER; note = 2'-O-methyladenosine
  modified_base 16: mod_base = cm
  modified_base 17: mod_base = OTHER; note = 2'-O-methyladenosine
  modified_base 18: mod_base = OTHER; note = 2'-O-methyladenosine
  modified_base 19: mod_base = gm
  modified_base 20: mod_base = OTHER; note = 2'-O-methyladenosine
  modified_base 21: mod_base = um
  source 1..21: mol_type = other RNA
catctttgatgaggacaagat

SEQ ID NO: 1299 - RNA, 21 nt, synthetic construct
  modified_base 1: mod_base = gm
  modified_base 1^2: mod_base = OTHER; note = phosphorothioate linkage
  modified_base 2: mod_base = cm
  modified_base 3: mod_base = um
  modified_base 4: mod_base = um
  modified_base 5: mod_base = um
  modified_base 6: mod_base = gm
  modified_base 7: mod_base = OTHER; note = 2'-O-methyladenosine
  modified_base 8: mod_base = um
  modified_base 9: mod_base = OTHER; note = 2'-fluoroguanosine
  modified_base 10: mod_base = OTHER; note = 2'-fluoroadenosine
  modified_base 11: mod_base = OTHER; note = 2'-fluoroguanosine
  modified_base 12: mod_base = gm
  modified_base 13: mod_base = OTHER; note = 2'-O-methyladenosine
  modified_base 14: mod_base = cm
  modified_base 15: mod_base = OTHER; note = 2'-O-methyladenosine
  modified_base 16: mod_base = OTHER; note = 2'-O-methyladenosine
  modified_base 17: mod_base = gm
  modified_base 18: mod_base = OTHER; note = 2'-O-methyladenosine
  modified_base 19: mod_base = um
  modified_base 20: mod_base = gm
  modified_base 21: mod_base = OTHER; note = 2'-O-methyladenosine
  source 1..21: mol_type = other RNA
gctttgatgaggacaagatga

SEQ ID NO: 1300 - RNA, 21 nt, synthetic construct
  modified_base 1: mod_base = gm
  modified_base 1^2: mod_base = OTHER; note = phosphorothioate linkage
  modified_base 2: mod_base = um
  modified_base 3: mod_base = cm
  modified_base 4: mod_base = um
  modified_base 5: mod_base = cm
  modified_base 6: mod_base = um
  modified_base 7: mod_base = gm
  modified_base 8: mod_base = cm
  modified_base 9: mod_base = OTHER; note = 2'-fluorouridine
  modified_base 10: mod_base = OTHER; note = 2'-fluorocytidine
  modified_base 11: mod_base = OTHER; note = 2'-fluorocytidine
  modified_base 12: mod_base = um
  modified_base 13: mod_base = OTHER; note = 2'-O-methyladenosine
  modified_base 14: mod_base = cm
  modified_base 15: mod_base = OTHER; note = 2'-O-methyladenosine
  modified_base 16: mod_base = OTHER; note = 2'-O-methyladenosine
  modified_base 17: mod_base = cm
  modified_base 18: mod_base = um
  modified_base 19: mod_base = OTHER; note = 2'-O-methyladenosine
  modified_base 20: mod_base = gm
  modified_base 21: mod_base = OTHER; note = 2'-O-methyladenosine
  source 1..21: mol_type = other RNA
gtctctgctcctacaactaga

SEQ ID NO: 1301 - RNA, 21 nt, synthetic construct
  modified_base 1: mod_base = cm
  modified_base 1^2: mod_base = OTHER; note = phosphorothioate linkage
  modified_base 2: mod_base = OTHER; note = 2'-O-methyladenosine
  modified_base 3: mod_base = OTHER; note = 2'-O-methyladenosine
  modified_base 4: mod_base = cm
  modified_base 5: mod_base = cm
  modified_base 6: mod_base = um
  modified_base 7: mod_base = cm
  modified_base 8: mod_base = um
  modified_base 9: mod_base = OTHER; note = 2'-fluoroguanosine
  modified_base 10: mod_base = OTHER; note = 2'-fluorocytidine
  modified_base 11: mod_base = OTHER; note = 2'-fluorouridine
  modified_base 12: mod_base = um
  modified_base 13: mod_base = cm
  modified_base 14: mod_base = um
  modified_base 15: mod_base = OTHER; note = 2'-O-methyladenosine
  modified_base 16: mod_base = cm
  modified_base 17: mod_base = OTHER; note = 2'-O-methyladenosine
  modified_base 18: mod_base = OTHER; note = 2'-O-methyladenosine
  modified_base 19: mod_base = cm
  modified_base 20: mod_base = um
  modified_base 21: mod_base = OTHER; note = 2'-O-methyladenosine
  source 1..21: mol_type = other RNA
caacctctgcttctacaacta

SEQ ID NO: 1302 - RNA, 21 nt, synthetic construct
  modified_base 1: mod_base = cm
  modified_base 1^2: mod_base = OTHER; note = phosphorothioate linkage
  modified_base 2: mod_base = um
  modified_base 3: mod_base = OTHER; note = 2'-O-methyl-2-aminoadenosine
  modified_base 4: mod_base = um
  modified_base 5: mod_base = OTHER; note = 2'-O-methyladenosine
  modified_base 6: mod_base = OTHER; note = 2'-O-methyladenosine
  modified_base 7: mod_base = cm
  modified_base 8: mod_base = cm
  modified_base 9: mod_base = OTHER; note = 2'-fluoroadenosine
  modified_base 10: mod_base = OTHER; note = 2'-fluoroguanosine
  modified_base 11: mod_base = OTHER; note = 2'-fluorocytidine
  modified_base 12: mod_base = OTHER; note = 2'-O-methyladenosine
  modified_base 13: mod_base = cm
  modified_base 14: mod_base = OTHER; note = 2'-O-methyladenosine
  modified_base 15: mod_base = OTHER; note = 2'-O-methyladenosine
  modified_base 16: mod_base = cm
  modified_base 17: mod_base = um
  modified_base 18: mod_base = um
  modified_base 19: mod_base = cm
  modified_base 20: mod_base = um
  modified_base 21: mod_base = OTHER; note = 2'-O-methyladenosine
  source 1..21: mol_type = other RNA
ctntaaccagcacaacttcta

SEQ ID NO: 1303 - RNA, 21 nt, synthetic construct
  modified_base 1: mod_base = cm
  modified_base 1^2: mod_base = OTHER; note = phosphorothioate linkage
  modified_base 2: mod_base = um
  modified_base 3: mod_base = OTHER; note = 2'-O-methyladenosine
  modified_base 4: mod_base = um
  modified_base 5: mod_base = OTHER; note = 2'-O-methyladenosine
  modified_base 6: mod_base = OTHER; note = 2'-O-methyladenosine
  modified_base 7: mod_base = cm
  modified_base 8: mod_base = cm
  modified_base 9: mod_base = OTHER; note = 2'-fluoroadenosine
  modified_base 10: mod_base = OTHER; note = 2'-fluoroguanosine
  modified_base 11: mod_base = OTHER; note = 2'-fluorocytidine
  modified_base 12: mod_base = OTHER; note = 2'-O-methyladenosine
  modified_base 13: mod_base = cm
  modified_base 14: mod_base = OTHER; note = 2'-O-methyladenosine
  modified_base 15: mod_base = OTHER; note = 2'-O-methyladenosine
  modified_base 16: mod_base = cm
  modified_base 17: mod_base = um
  modified_base 18: mod_base = um
  modified_base 19: mod_base = cm
  modified_base 20: mod_base = um
  modified_base 21: mod_base = OTHER; note = 2'-O-methyladenosine
  source 1..21: mol_type = other RNA
ctataaccagcacaacttcta

SEQ ID NO: 1304 - RNA, 21 nt, synthetic construct
  modified_base 1: mod_base = gm
  modified_base 1^2: mod_base = OTHER; note = phosphorothioate linkage
  modified_base 2: mod_base = cm
  modified_base 3: mod_base = um
  modified_base 4: mod_base = gm
  modified_base 5: mod_base = um
  modified_base 6: mod_base = um
  modified_base 7: mod_base = cm
  modified_base 8: mod_base = um
  modified_base 9: mod_base = OTHER; note = 2'-fluoroguanosine
  modified_base 10: mod_base = cm
  modified_base 11: mod_base = OTHER; note = 2'-fluoroguanosine
  modified_base 12: mod_base = OTHER; note = 2'-O-methyladenosine
  modified_base 13: mod_base = OTHER; note = 2'-fluorocytidine
  modified_base 14: mod_base = um
  modified_base 15: mod_base = OTHER; note = 2'-O-methyladenosine
  modified_base 16: mod_base = cm
  modified_base 17: mod_base = um
  modified_base 18: mod_base = OTHER; note = 2'-O-methyladenosine
  modified_base 19: mod_base = cm
  modified_base 20: mod_base = OTHER; note = 2'-O-methyladenosine
  modified_base 21: mod_base = OTHER; note = 2'-O-methyladenosine
  source 1..21: mol_type = other RNA
gctgttctgcgactactacaa

SEQ ID NO: 1305 - RNA, 21 nt, synthetic construct
  modified_base 1: mod_base = gm
  modified_base 1^2: mod_base = OTHER; note = phosphorothioate linkage
  modified_base 2: mod_base = cm
  modified_base 3: mod_base = um
  modified_base 4: mod_base = gm
  modified_base 5: mod_base = um
  modified_base 6: mod_base = um
  modified_base 7: mod_base = OTHER; note = 2'-fluorocytidine
  modified_base 8: mod_base = um
  modified_base 9: mod_base = OTHER; note = 2'-fluoroguanosine
  modified_base 10: mod_base = cm
  modified_base 11: mod_base = OTHER; note = 2'-fluoroguanosine
  modified_base 12: mod_base = OTHER; note = 2'-O-methyladenosine
  modified_base 13: mod_base = cm
  modified_base 14: mod_base = um
  modified_base 15: mod_base = OTHER; note = 2'-O-methyladenosine
  modified_base 16: mod_base = cm
  modified_base 17: mod_base = um
  modified_base 18: mod_base = OTHER; note = 2'-O-methyladenosine
  modified_base 19: mod_base = cm
  modified_base 20: mod_base = OTHER; note = 2'-O-methyladenosine
  modified_base 21: mod_base = OTHER; note = 2'-O-methyladenosine
  source 1..21: mol_type = other RNA
gctgttctgcgactactacaa

SEQ ID NO: 1306 - RNA, 21 nt, synthetic construct
  modified_base 1: mod_base = gm
  modified_base 1^2: mod_base = OTHER; note = phosphorothioate linkage
  modified_base 2: mod_base = cm
  modified_base 3: mod_base = um
  modified_base 4: mod_base = gm
  modified_base 5: mod_base = um
  modified_base 6: mod_base = um
  modified_base 7: mod_base = cm
  modified_base 8: mod_base = um
  modified_base 9: mod_base = OTHER; note = 2'-fluoroguanosine
  modified_base 10: mod_base = cm
  modified_base 11: mod_base = OTHER; note = 2'-fluoroguanosine
  modified_base 12: mod_base = OTHER; note = 2'-O-methyladenosine
  modified_base 13: mod_base = cm
  modified_base 14: mod_base = um
  modified_base 15: mod_base = OTHER; note = 2'-O-methyladenosine
  modified_base 16: mod_base = cm
  modified_base 17: mod_base = um
  modified_base 18: mod_base = OTHER; note = 2'-O-methyladenosine
  modified_base 19: mod_base = cm
  modified_base 20: mod_base = OTHER; note = 2'-O-methyladenosine
  modified_base 21: mod_base = OTHER; note = 2'-O-methyladenosine
  source 1..21: mol_type = other RNA
gctgttctgcgactactacaa

SEQ ID NO: 1307 - RNA, 21 nt, synthetic construct
  modified_base 1: mod_base = gm
  modified_base 1^2: mod_base = OTHER; note = phosphorothioate linkage
  modified_base 2: mod_base = cm
  modified_base 3: mod_base = um
  modified_base 4: mod_base = gm
  modified_base 5: mod_base = um
  modified_base 6: mod_base = um
  modified_base 7: mod_base = um
  modified_base 8: mod_base = um
  modified_base 9: mod_base = OTHER; note = 2'-fluoroguanosine
  modified_base 10: mod_base = cm
  modified_base 11: mod_base = OTHER; note = 2'-fluoroguanosine
  modified_base 12: mod_base = OTHER; note = 2'-O-methyladenosine
  modified_base 13: mod_base = cm
  modified_base 14: mod_base = um
  modified_base 15: mod_base = OTHER; note = 2'-O-methyladenosine
  modified_base 16: mod_base = cm
  modified_base 17: mod_base = um
  modified_base 18: mod_base = OTHER; note = 2'-O-methyladenosine
  modified_base 19: mod_base = cm
  modified_base 20: mod_base = OTHER; note = 2'-O-methyladenosine
  modified_base 21: mod_base = OTHER; note = 2'-O-methyladenosine
  source 1..21: mol_type = other RNA
gctgttttgcgactactacaa

SEQ ID NO: 1308 - RNA, 21 nt, synthetic construct
  modified_base 1: mod_base = gm
  modified_base 1^2: mod_base = OTHER; note = phosphorothioate linkage
  modified_base 2: mod_base = cm
  modified_base 3: mod_base = um
  modified_base 4: mod_base = gm
  modified_base 5: mod_base = um
  modified_base 6: mod_base = um
  modified_base 7: mod_base = cm
  modified_base 8: mod_base = um
  modified_base 9: mod_base = OTHER; note = 2'-fluoroguanosine
  modified_base 10: mod_base = cm
  modified_base 11: mod_base = OTHER; note = 2'-fluoroguanosine
  modified_base 12: mod_base = OTHER; note = 2'-O-methyladenosine
  modified_base 13: mod_base = um
  modified_base 14: mod_base = um
  modified_base 15: mod_base = OTHER; note = 2'-O-methyladenosine
  modified_base 16: mod_base = cm
  modified_base 17: mod_base = um
  modified_base 18: mod_base = OTHER; note = 2'-O-methyladenosine
  modified_base 19: mod_base = cm
  modified_base 20: mod_base = OTHER; note = 2'-O-methyladenosine
  modified_base 21: mod_base = OTHER; note = 2'-O-methyladenosine
  source 1..21: mol_type = other RNA
gctgttctgcgattactacaa

SEQ ID NO: 1309 - RNA, 21 nt, synthetic construct
  modified_base 1: mod_base = gm
  modified_base 1^2: mod_base = OTHER; note = phosphorothioate linkage
  modified_base 2: mod_base = cm
  modified_base 3: mod_base = um
  modified_base 4: mod_base = gm
  modified_base 5: mod_base = um
  modified_base 6: mod_base = um
  modified_base 7: mod_base = cm
  modified_base 8: mod_base = um
  modified_base 9: mod_base = OTHER; note = 2'-fluoroguanosine
  modified_base 10: mod_base = cm
  modified_base 11: mod_base = OTHER; note = 2'-fluoroguanosine
  modified_base 12: mod_base = OTHER; note = 2'-O-methyladenosine
  modified_base 13: mod_base = cm
  modified_base 14: mod_base = um
  modified_base 15: mod_base = OTHER; note = 2'-O-methyladenosine
  modified_base 16: mod_base = um
  modified_base 17: mod_base = um
  modified_base 18: mod_base = OTHER; note = 2'-O-methyladenosine
  modified_base 19: mod_base = cm
  modified_base 20: mod_base = OTHER; note = 2'-O-methyladenosine
  modified_base 21: mod_base = OTHER; note = 2'-O-methyladenosine
  source 1..21: mol_type = other RNA
gctgttctgcgactattacaa

SEQ ID NO: 1310 - RNA, 21 nt, synthetic construct
  modified_base 1: mod_base = gm
  modified_base 1^2: mod_base = OTHER; note = phosphorothioate linkage
  modified_base 2: mod_base = cm
  modified_base 3: mod_base = um
  modified_base 4: mod_base = gm
  modified_base 5: mod_base = um
  modified_base 6: mod_base = um
  modified_base 7: mod_base = cm
  modified_base 8: mod_base = um
  modified_base 9: mod_base = OTHER; note = 2'-fluoroguanosine
  modified_base 10: mod_base = cm
  modified_base 11: mod_base = OTHER; note = 2'-fluoroguanosine
  modified_base 12: mod_base = OTHER; note = 2'-fluoroadenosine
  modified_base 13: mod_base = cm
  modified_base 14: mod_base = um
  modified_base 15: mod_base = OTHER; note = 2'-O-methyladenosine
  modified_base 16: mod_base = cm
  modified_base 17: mod_base = um
  modified_base 18: mod_base = OTHER; note = 2'-O-methyladenosine
  modified_base 19: mod_base = cm
  modified_base 20: mod_base = OTHER; note = 2'-O-methyladenosine
  modified_base 21: mod_base = OTHER; note = 2'-O-methyladenosine
  source 1..21: mol_type = other RNA
gctgttctgcgactactacaa

SEQ ID NO: 1311 - RNA, 21 nt, synthetic construct
  modified_base 1: mod_base = gm
  modified_base 1^2: mod_base = OTHER; note = phosphorothioate linkage
  modified_base 2: mod_base = cm
  modified_base 3: mod_base = um
  modified_base 4: mod_base = gm
  modified_base 5: mod_base = OTHER; note = 2'-O-methyladenosine
  modified_base 6: mod_base = um
  modified_base 7: mod_base = um
  modified_base 8: mod_base = um
  modified_base 9: mod_base = OTHER; note = 2'-fluoroguanosine
  modified_base 10: mod_base = cm
  modified_base 11: mod_base = OTHER; note = 2'-fluorocytidine
  modified_base 12: mod_base = um
  modified_base 13: mod_base = gm
  modified_base 14: mod_base = OTHER; note = 2'-O-methyladenosine
  modified_base 15: mod_base = OTHER; note = 2'-O-methyladenosine
  modified_base 16: mod_base = cm
  modified_base 17: mod_base = OTHER; note = 2'-O-methyladenosine
  modified_base 18: mod_base = OTHER; note = 2'-O-methyladenosine
  modified_base 19: mod_base = gm
  modified_base 20: mod_base = OTHER; note = 2'-O-methyladenosine
  modified_base 21: mod_base = OTHER; note = 2'-O-methyladenosine
  source 1..21: mol_type = other RNA
gctgatttgcctgaacaagaa

SEQ ID NO: 1312 - RNA, 21 nt, synthetic construct
  modified_base 1: mod_base = gm
  modified_base 1^2: mod_base = OTHER; note = phosphorothioate linkage
  modified_base 2: mod_base = cm
  modified_base 3: mod_base = um
  modified_base 4: mod_base = gm
  modified_base 5: mod_base = OTHER; note = 2'-O-methyladenosine
  modified_base 6: mod_base = um
  modified_base 7: mod_base = um
  modified_base 8: mod_base = um
  modified_base 9: mod_base = OTHER; note = 2'-fluoroguanosine
  modified_base 10: mod_base = cm
  modified_base 11: mod_base = OTHER; note = 2'-fluorocytidine
  modified_base 12: mod_base = um
  modified_base 13: mod_base = OTHER; note = 2'-fluoroguanosine
  modified_base 14: mod_base = OTHER; note = 2'-O-methyladenosine
  modified_base 15: mod_base = OTHER; note = 2'-O-methyladenosine
  modified_base 16: mod_base = cm
  modified_base 17: mod_base = OTHER; note = 2'-O-methyladenosine
  modified_base 18: mod_base = OTHER; note = 2'-O-methyladenosine
  modified_base 19: mod_base = gm
  modified_base 20: mod_base = OTHER; note = 2'-O-methyladenosine
  modified_base 21: mod_base = OTHER; note = 2'-O-methyladenosine
  source 1..21: mol_type = other RNA
gctgatttgcctgaacaagaa

SEQ ID NO: 1313 - RNA, 21 nt, synthetic construct
  modified_base 1: mod_base = cm
  modified_base 1^2: mod_base = OTHER; note = phosphorothioate linkage
  modified_base 2: mod_base = cm
  modified_base 3: mod_base = um
  modified_base 4: mod_base = gm
  modified_base 5: mod_base = OTHER; note = 2'-O-methyladenosine
  modified_base 6: mod_base = um
  modified_base 7: mod_base = OTHER; note = 2'-fluorouridine
  modified_base 8: mod_base = um
  modified_base 9: mod_base = OTHER; note = 2'-fluoroguanosine
  modified_base 10: mod_base = cm
  modified_base 11: mod_base = OTHER; note = 2'-fluorocytidine
  modified_base 12: mod_base = um
  modified_base 13: mod_base = gm
  modified_base 14: mod_base = OTHER; note = 2'-O-methyladenosine
  modified_base 15: mod_base = OTHER; note = 2'-O-methyladenosine
  modified_base 16: mod_base = cm
  modified_base 17: mod_base = OTHER; note = 2'-O-methyladenosine
  modified_base 18: mod_base = OTHER; note = 2'-O-methyladenosine
  modified_base 19: mod_base = gm
  modified_base 20: mod_base = OTHER; note = 2'-O-methyladenosine
  modified_base 21: mod_base = OTHER; note = 2'-O-methyladenosine
  source 1..21: mol_type = other RNA
cctgatttgcctgaacaagaa

SEQ ID NO: 1314 - RNA, 21 nt, synthetic construct
  modified_base 1: mod_base = cm
  modified_base 1^2: mod_base = OTHER; note = phosphorothioate linkage
  modified_base 2: mod_base = gm
  modified_base 3: mod_base = OTHER; note = 2'-O-methyladenosine
  modified_base 4: mod_base = gm
  modified_base 5: mod_base = OTHER; note = 2'-O-methyladenosine
  modified_base 6: mod_base = um
  modified_base 7: mod_base = cm
  modified_base 8: mod_base = OTHER; note = 2'-O-methyladenosine
  modified_base 9: mod_base = OTHER; note = 2'-fluorouridine
  modified_base 10: mod_base = OTHER; note = 2'-fluorocytidine
  modified_base 11: mod_base = OTHER; note = 2'-fluorouridine
  modified_base 12: mod_base = um
  modified_base 13: mod_base = cm
  modified_base 14: mod_base = OTHER; note = 2'-O-methyladenosine
  modified_base 15: mod_base = OTHER; note = 2'-O-methyladenosine
  modified_base 16: mod_base = cm
  modified_base 17: mod_base = OTHER; note = 2'-O-methyladenosine
  modified_base 18: mod_base = OTHER; note = 2'-O-methyladenosine
  modified_base 19: mod_base = cm
  modified_base 20: mod_base = OTHER; note = 2'-O-methyladenosine
  modified_base 21: mod_base = OTHER; note = 2'-O-methyladenosine
  source 1..21: mol_type = other RNA
cgagatcatcttcaacaacaa

SEQ ID NO: 1315 - RNA, 21 nt, synthetic construct
  modified_base 1: mod_base = gm
  modified_base 1^2: mod_base = OTHER; note = phosphorothioate linkage
  modified_base 2: mod_base = cm
  modified_base 3: mod_base = um
  modified_base 4: mod_base = gm
  modified_base 5: mod_base = OTHER; note = 2'-O-methyladenosine
  modified_base 6: mod_base = um
  modified_base 7: mod_base = OTHER; note = 2'-fluorouridine
  modified_base 8: mod_base = um
  modified_base 9: mod_base = OTHER; note = 2'-fluoroguanosine
  modified_base 10: mod_base = cm
  modified_base 11: mod_base = OTHER; note = 2'-fluorocytidine
  modified_base 12: mod_base = um
  modified_base 13: mod_base = gm
  modified_base 14: mod_base = OTHER; note = 2'-O-methyladenosine
  modified_base 15: mod_base = OTHER; note = 2'-O-methyladenosine
  modified_base 16: mod_base = cm
  modified_base 17: mod_base = OTHER; note = 2'-O-methyladenosine
  modified_base 18: mod_base = OTHER; note = 2'-O-methyladenosine
  modified_base 19: mod_base = gm
  modified_base 20: mod_base = OTHER; note = 2'-O-methyladenosine
  modified_base 21: mod_base = OTHER; note = 2'-O-methyladenosine
  source 1..21: mol_type = other RNA
gctgatttgcctgaacaagaa

SEQ ID NO: 1316 - RNA, 21 nt, synthetic construct
  modified_base 1: mod_base = gm
  modified_base 1^2: mod_base = OTHER; note = phosphorothioate linkage
  modified_base 2: mod_base = cm
  modified_base 3: mod_base = um
  modified_base 4: mod_base = gm
  modified_base 5: mod_base = um
  modified_base 6: mod_base = um
  modified_base 7: mod_base = cm
  modified_base 8: mod_base = um
  modified_base 9: mod_base = OTHER; note = 2'-fluoroguanosine
  modified_base 10: mod_base = OTHER; note = 2'-fluorocytidine
  modified_base 11: mod_base = OTHER; note = 2'-fluoroguanosine
  modified_base 12: mod_base = OTHER; note = 2'-O-methyladenosine
  modified_base 13: mod_base = cm
  modified_base 14: mod_base = um
  modified_base 15: mod_base = OTHER; note = 2'-O-methyladenosine
  modified_base 16: mod_base = cm
  modified_base 17: mod_base = um
  modified_base 18: mod_base = OTHER; note = 2'-O-methyladenosine
  modified_base 19: mod_base = cm
  modified_base 20: mod_base = OTHER; note = 2'-O-methyladenosine
  modified_base 21: mod_base = OTHER; note = 2'-O-methyladenosine
  source 1..21: mol_type = other RNA
gctgttctgcgactactacaa

SEQ ID NO: 1317 - RNA, 22 nt, synthetic construct
  modified_base 1: mod_base = gm
  modified_base 1^2: mod_base = OTHER; note = phosphorothioate linkage
  modified_base 2: mod_base = cm
  modified_base 3: mod_base = um
  modified_base 4: mod_base = gm
  modified_base 5: mod_base = gm
  modified_base 6: mod_base = um
  modified_base 7: mod_base = um
  modified_base 8: mod_base = cm
  modified_base 9: mod_base = um
  modified_base 10: mod_base = OTHER; note = 2'-fluoroguanosine
  modified_base 11: mod_base = OTHER; note = 2'-fluorocytidine
  modified_base 12: mod_base = OTHER; note = 2'-fluoroguanosine
  modified_base 13: mod_base = OTHER; note = 2'-O-methyladenosine
  modified_base 14: mod_base = cm
  modified_base 15: mod_base = um
  modified_base 16: mod_base = OTHER; note = 2'-O-methyladenosine
  modified_base 17: mod_base = cm
  modified_base 18: mod_base = um
  modified_base 19: mod_base = OTHER; note = 2'-O-methyladenosine
  modified_base 20: mod_base = cm
  modified_base 21: mod_base = OTHER; note = 2'-O-methyladenosine
  modified_base 22: mod_base = OTHER; note = 2'-O-methyladenosine
  source 1..22: mol_type = other RNA
gctggttctgcgactactacaa

SEQ ID NO: 1318 - RNA, 20 nt, synthetic construct
  modified_base 1: mod_base = gm
  modified_base 1^2: mod_base = OTHER; note = phosphorothioate linkage
  modified_base 2: mod_base = cm
  modified_base 3: mod_base = gm
  modified_base 4: mod_base = um
  modified_base 5: mod_base = um
  modified_base 6: mod_base = cm
  modified_base 7: mod_base = um
  modified_base 8: mod_base = OTHER; note = 2'-fluoroguanosine
  modified_base 9: mod_base = OTHER; note = 2'-fluorocytidine
  modified_base 10: mod_base = OTHER; note = 2'-fluoroguanosine
  modified_base 11: mod_base = OTHER; note = 2'-O-methyladenosine
  modified_base 12: mod_base = cm
  modified_base 13: mod_base = um
  modified_base 14: mod_base = OTHER; note = 2'-O-methyladenosine
  modified_base 15: mod_base = cm
  modified_base 16: mod_base = um
  modified_base 17: mod_base = OTHER; note = 2'-O-methyladenosine
  modified_base 18: mod_base = cm
  modified_base 19: mod_base = OTHER; note = 2'-O-methyladenosine
  modified_base 20: mod_base = OTHER; note = 2'-O-methyladenosine
  source 1..20: mol_type = other RNA
gcgttctgcgactactacaa

SEQ ID NO: 1319 - RNA, 21 nt, synthetic construct
  modified_base 1: mod_base = OTHER; note = 2'-O-methyladenosine
  modified_base 2: mod_base = cm
  modified_base 3: mod_base = cm
  modified_base 4: mod_base = um
  modified_base 5: mod_base = gm
  modified_base 6: mod_base = cm
  modified_base 7: mod_base = um
  modified_base 8: mod_base = cm
  modified_base 9: mod_base = OTHER; note = 2'-fluorocytidine
  modified_base 10: mod_base = OTHER; note = 2'-fluoroadenosine
  modified_base 11: mod_base = OTHER; note = 2'-fluoroadenosine
  modified_base 12: mod_base = gm
  modified_base 13: mod_base = OTHER; note = 2'-O-methylinosine
  modified_base 14: mod_base = cm
  modified_base 15: mod_base = cm
  modified_base 16: mod_base = OTHER; note = 2'-O-methyladenosine
  modified_base 17: mod_base = um
  modified_base 18: mod_base = cm
  modified_base 19: mod_base = OTHER; note = 2'-O-methyladenosine
  modified_base 20: mod_base = OTHER; note = 2'-O-methyladenosine
  modified_base 21: mod_base = OTHER; note = 2'-O-methyladenosine
  source 1..21: mol_type = other RNA
acctgctccaagnccatcaaa

SEQ ID NO: 1320 - RNA, 21 nt, synthetic construct
  modified_base 1: mod_base = um
  modified_base 2: mod_base = gm
  modified_base 3: mod_base = cm
  modified_base 4: mod_base = um
  modified_base 5: mod_base = cm
  modified_base 6: mod_base = cm
  modified_base 7: mod_base = OTHER; note = 2'-O-methyladenosine
  modified_base 8: mod_base = OTHER; note = 2'-O-methyladenosine
  modified_base 9: mod_base = OTHER; note = 2'-fluoroguanosine
  modified_base 10: mod_base = OTHER; note = 2'-fluoroguanosine
  modified_base 11: mod_base = OTHER; note = 2'-fluorocytidine
  modified_base 12: mod_base = cm
  modified_base 13: mod_base = OTHER; note = 2'-O-methyladenosine
  modified_base 14: mod_base = um
  modified_base 15: mod_base = cm
  modified_base 16: mod_base = OTHER; note = 2'-O-methyladenosine
  modified_base 17: mod_base = OTHER; note = 2'-O-methyladenosine
  modified_base 18: mod_base = gm
  modified_base 19: mod_base = OTHER; note = 2'-O-methyladenosine
  modified_base 20: mod_base = um
  modified_base 21: mod_base = um
  source 1..21: mol_type = other RNA
tgctccaaggccatcaagatt

SEQ ID NO: 1321 - RNA, 21 nt, synthetic construct
  modified_base 1: mod_base = OTHER; note = 2'-O-methyladenosine
  modified_base 2: mod_base = OTHER; note = 2'-O-methyladenosine
  modified_base 3: mod_base = cm
  modified_base 4: mod_base = cm
  modified_base 5: mod_base = um
  modified_base 6: mod_base = cm
  modified_base 7: mod_base = OTHER; note = 2'-O-methyladenosine
  modified_base 8: mod_base = gm
  modified_base 9: mod_base = OTHER; note = 2'-fluorocytidine
  modified_base 10: mod_base = OTHER; note = 2'-fluorouridine
  modified_base 11: mod_base = OTHER; note = 2'-fluorocytidine
  modified_base 12: mod_base = cm
  modified_base 13: mod_base = gm
  modified_base 14: mod_base = OTHER; note = 2'-O-methyladenosine
  modified_base 15: mod_base = gm
  modified_base 16: mod_base = um
  modified_base 17: mod_base = um
  modified_base 18: mod_base = cm
  modified_base 19: mod_base = OTHER; note = 2'-O-methyladenosine
  modified_base 20: mod_base = OTHER; note = 2'-O-methyladenosine
  modified_base 21: mod_base = OTHER; note = 2'-O-methyladenosine
  source 1..21: mol_type = other RNA
aacctcagctccgagttcaaa

SEQ ID NO: 1322 - RNA, 21 nt, synthetic construct
  modified_base 1: mod_base = cm
  modified_base 2: mod_base = cm
  modified_base 3: mod_base = cm
  modified_base 4: mod_base = OTHER; note = 2'-O-methyladenosine
  modified_base 5: mod_base = gm
  modified_base 6: mod_base = OTHER; note = 2'-O-methyladenosine
  modified_base 7: mod_base = OTHER; note = 2'-O-methyladenosine
  modified_base 8: mod_base = gm
  modified_base 9: mod_base = OTHER; note = 2'-fluorocytidine
  modified_base 10: mod_base = OTHER; note = 2'-fluoroadenosine
  modified_base 11: mod_base = OTHER; note = 2'-fluoroguanosine
  modified_base 12: mod_base = um
  modified_base 13: mod_base = gm
  modified_base 14: mod_base = cm
  modified_base 15: mod_base = OTHER; note = 2'-O-methyladenosine
  modified_base 16: mod_base = OTHER; note = 2'-O-methylinosine
  modified_base 17: mod_base = cm
  modified_base 18: mod_base = OTHER; note = 2'-O-methyladenosine
  modified_base 19: mod_base = um
  modified_base 20: mod_base = cm
  modified_base 21: mod_base = OTHER; note = 2'-O-methyladenosine
  source 1..21: mol_type = other RNA
cccagaagcagtgcancatca

SEQ ID NO: 1323 - RNA, 21 nt, synthetic construct
  modified_base 1: mod_base = um
  modified_base 2: mod_base = gm
  modified_base 3: mod_base = cm
  modified_base 4: mod_base = cm
  modified_base 5: mod_base = cm
  modified_base 6: mod_base = um
  modified_base 7: mod_base = cm
  modified_base 8: mod_base = um
  modified_base 9: mod_base = OTHER; note = 2'-fluoroguanosine
  modified_base 10: mod_base = OTHER; note = 2'-fluorouridine
  modified_base 11: mod_base = OTHER; note = 2'-fluorouridine
  modified_base 12: mod_base = cm
  modified_base 13: mod_base = um
  modified_base 14: mod_base = gm
  modified_base 15: mod_base = cm
  modified_base 16: mod_base = OTHER; note = 2'-O-methylinosine
  modified_base 17: mod_base = OTHER; note = 2'-O-methyladenosine
  modified_base 18: mod_base = cm
  modified_base 19: mod_base = um
  modified_base 20: mod_base = OTHER; note = 2'-O-methyladenosine
  modified_base 21: mod_base = OTHER; note = 2'-O-methyladenosine
  source 1..21: mol_type = other RNA
tgccctctgttctgcnactaa

SEQ ID NO: 1324 - RNA, 21 nt, synthetic construct
  modified_base 1: mod_base = gm
  modified_base 2: mod_base = cm
  modified_base 3: mod_base = cm
  modified_base 4: mod_base = cm
  modified_base 5: mod_base = um
  modified_base 6: mod_base = cm
  modified_base 7: mod_base = um
  modified_base 8: mod_base = gm
  modified_base 9: mod_base = OTHER; note = 2'-fluorouridine
  modified_base 10: mod_base = OTHER; note = 2'-fluorouridine
  modified_base 11: mod_base = OTHER; note = 2'-fluorocytidine
  modified_base 12: mod_base = um
  modified_base 13: mod_base = OTHER; note = 2'-O-methylinosine
  modified_base 14: mod_base = cm
  modified_base 15: mod_base = gm
  modified_base 16: mod_base = OTHER; note = 2'-O-methyladenosine
  modified_base 17: mod_base = cm
  modified_base 18: mod_base = um
  modified_base 19: mod_base = OTHER; note = 2'-O-methyladenosine
  modified_base 20: mod_base = cm
  modified_base 21: mod_base = um
  source 1..21: mol_type = other RNA
gccctctgttctncgactact

SEQ ID NO: 1325 - RNA, 21 nt, synthetic construct
  modified_base 1: mod_base = cm
  modified_base 2: mod_base = cm
  modified_base 3: mod_base = um
  modified_base 4: mod_base = cm
  modified_base 5: mod_base = um
  modified_base 6: mod_base = gm
  modified_base 7: mod_base = um
  modified_base 8: mod_base = um
  modified_base 9: mod_base = OTHER; note = 2'-fluorocytidine
  modified_base 10: mod_base = OTHER; note = 2'-fluorouridine
  modified_base 11: mod_base = OTHER; note = 2'-fluoroguanosine
  modified_base 12: mod_base = cm
  modified_base 13: mod_base = gm
  modified_base 14: mod_base = OTHER; note = 2'-O-methyladenosine
  modified_base 15: mod_base = cm
  modified_base 16: mod_base = um
  modified_base 17: mod_base = OTHER; note = 2'-O-methyladenosine
  modified_base 18: mod_base = cm
  modified_base 19: mod_base = um
  modified_base 20: mod_base = OTHER; note = 2'-O-methyladenosine
  modified_base 21: mod_base = OTHER; note = 2'-O-methyladenosine
  source 1..21: mol_type = other RNA
cctctgttctgcgactactaa

SEQ ID NO: 1326 - RNA, 21 nt, synthetic construct
  modified_base 1: mod_base = cm
  modified_base 2: mod_base = um
  modified_base 3: mod_base = cm
  modified_base 4: mod_base = um
  modified_base 5: mod_base = gm
  modified_base 6: mod_base = um
  modified_base 7: mod_base = um
  modified_base 8: mod_base = cm
  modified_base 9: mod_base = OTHER; note = 2'-fluorouridine
  modified_base 10: mod_base = OTHER; note = 2'-fluoroguanosine
  modified_base 11: mod_base = OTHER; note = 2'-fluorocytidine
  modified_base 12: mod_base = gm
  modified_base 13: mod_base = OTHER; note = 2'-O-methyladenosine
  modified_base 14: mod_base = cm
  modified_base 15: mod_base = um
  modified_base 16: mod_base = OTHER; note = 2'-O-methyladenosine
  modified_base 17: mod_base = cm
  modified_base 18: mod_base = um
  modified_base 19: mod_base = OTHER; note = 2'-O-methyladenosine
  modified_base 20: mod_base = cm
  modified_base 21: mod_base = OTHER; note = 2'-O-methyladenosine
  source 1..21: mol_type = other RNA
ctctgttctgcgactactaca

SEQ ID NO: 1327 - RNA, 21 nt, synthetic construct
  modified_base 1: mod_base = gm
  modified_base 2: mod_base = cm
  modified_base 3: mod_base = um
  modified_base 4: mod_base = gm
  modified_base 5: mod_base = um
  modified_base 6: mod_base = um
  modified_base 7: mod_base = cm
  modified_base 8: mod_base = um
  modified_base 9: mod_base = OTHER; note = 2'-fluoroguanosine
  modified_base 10: mod_base = OTHER; note = 2'-fluorocytidine
  modified_base 11: mod_base = OTHER; note = 2'-fluoroguanosine
  modified_base 12: mod_base = OTHER; note = 2'-O-methyladenosine
  modified_base 13: mod_base = cm
  modified_base 14: mod_base = um
  modified_base 15: mod_base = OTHER; note = 2'-O-methyladenosine
  modified_base 16: mod_base = cm
  modified_base 17: mod_base = um
  modified_base 18: mod_base = OTHER; note = 2'-O-methyladenosine
  modified_base 19: mod_base = cm
  modified_base 20: mod_base = OTHER; note = 2'-O-methyladenosine
  modified_base 21: mod_base = OTHER; note = 2'-O-methyladenosine
  source 1..21: mol_type = other RNA
gctgttctgcgactactacaa

SEQ ID NO: 1328 - RNA, 21 nt, synthetic construct
  modified_base 1: mod_base = cm
  modified_base 2: mod_base = cm
  modified_base 3: mod_base = OTHER; note = 2'-O-methyladenosine
  modified_base 4: mod_base = cm
  modified_base 5: mod_base = cm
  modified_base 6: mod_base = cm
  modified_base 7: mod_base = OTHER; note = 2'-O-methyladenosine
  modified_base 8: mod_base = um
  modified_base 9: mod_base = OTHER; note = 2'-fluorocytidine
  modified_base 10: mod_base = OTHER; note = 2'-fluorouridine
  modified_base 11: mod_base = OTHER; note = 2'-fluoroguanosine
  modified_base 12: mod_base = cm
  modified_base 13: mod_base = um
  modified_base 14: mod_base = OTHER; note = 2'-O-methyladenosine
  modified_base 15: mod_base = cm
  modified_base 16: mod_base = OTHER; note = 2'-O-methyladenosine
  modified_base 17: mod_base = OTHER; note = 2'-O-methyladenosine
  modified_base 18: mod_base = cm
  modified_base 19: mod_base = um
  modified_base 20: mod_base = OTHER; note = 2'-O-methyladenosine
  modified_base 21: mod_base = um
  source 1..21: mol_type = other RNA
ccacccatctgctacaactat

SEQ ID NO: 1329 - RNA, 21 nt, synthetic construct
  modified_base 1: mod_base = gm
  modified_base 2: mod_base = cm
  modified_base 3: mod_base = OTHER; note = 2'-O-methyladenosine
  modified_base 4: mod_base = OTHER; note = 2'-O-methyladenosine
  modified_base 5: mod_base = OTHER; note = 2'-O-methyladenosine
  modified_base 6: mod_base = gm
  modified_base 7: mod_base = um
  modified_base 8: mod_base = gm
  modified_base 9: mod_base = OTHER; note = 2'-fluoroguanosine
  modified_base 10: mod_base = OTHER; note = 2'-fluorouridine
  modified_base 11: mod_base = OTHER; note = 2'-fluorouridine
  modified_base 12: mod_base = cm
  modified_base 13: mod_base = gm
  modified_base 14: mod_base = OTHER; note = 2'-O-methyladenosine
  modified_base 15: mod_base = cm
  modified_base 16: mod_base = OTHER; note = 2'-O-methylinosine
  modified_base 17: mod_base = um
  modified_base 18: mod_base = gm
  modified_base 19: mod_base = gm
  modified_base 20: mod_base = OTHER; note = 2'-O-methyladenosine
  modified_base 21: mod_base = OTHER; note = 2'-O-methyladenosine
  source 1..21: mol_type = other RNA
gcaaagtggttcgacntggaa

SEQ ID NO: 1330 - RNA, 21 nt, synthetic construct
  modified_base 1: mod_base = gm
  modified_base 2: mod_base = OTHER; note = 2'-O-methyladenosine
  modified_base 3: mod_base = gm
  modified_base 4: mod_base = um
  modified_base 5: mod_base = gm
  modified_base 6: mod_base = gm
  modified_base 7: mod_base = um
  modified_base 8: mod_base = um
  modified_base 9: mod_base = OTHER; note = 2'-fluorocytidine
  modified_base 10: mod_base = OTHER; note = 2'-fluoroguanosine
  modified_base 11: mod_base = OTHER; note = 2'-fluoroadenosine
  modified_base 12: mod_base = cm
  modified_base 13: mod_base = gm
  modified_base 14: mod_base = um
  modified_base 15: mod_base = gm
  modified_base 16: mod_base = OTHER; note = 2'-O-methylinosine
  modified_base 17: mod_base = OTHER; note = 2'-O-methyladenosine
  modified_base 18: mod_base = cm
  modified_base 19: mod_base = um
  modified_base 20: mod_base = um
  modified_base 21: mod_base = OTHER; note = 2'-O-methyladenosine
  source 1..21: mol_type = other RNA
gagtggttcgacgtgnactta

SEQ ID NO: 1331 - RNA, 21 nt, synthetic construct
  modified_base 1: mod_base = gm
  modified_base 2: mod_base = um
  modified_base 3: mod_base = gm
  modified_base 4: mod_base = gm
  modified_base 5: mod_base = um
  modified_base 6: mod_base = um
  modified_base 7: mod_base = cm
  modified_base 8: mod_base = gm
  modified_base 9: mod_base = OTHER; note = 2'-fluoroadenosine
  modified_base 10: mod_base = OTHER; note = 2'-fluorocytidine
  modified_base 11: mod_base = OTHER; note = 2'-fluoroguanosine
  modified_base 12: mod_base = um
  modified_base 13: mod_base = gm
  modified_base 14: mod_base = OTHER; note = 2'-O-methylinosine
  modified_base 15: mod_base = OTHER; note = 2'-O-methyladenosine
  modified_base 16: mod_base = cm
  modified_base 17: mod_base = um
  modified_base 18: mod_base = um
  modified_base 19: mod_base = cm
  modified_base 20: mod_base = cm
  modified_base 21: mod_base = OTHER; note = 2'-O-methyladenosine
  source 1..21: mol_type = other RNA
gtggttcgacgtgnacttcca

SEQ ID NO: 1332 - RNA, 21 nt, synthetic construct
  modified_base 1: mod_base = gm
  modified_base 2: mod_base = um
  modified_base 3: mod_base = gm
  modified_base 4: mod_base = gm
  modified_base 5: mod_base = um
  modified_base 6: mod_base = um
  modified_base 7: mod_base = cm
  modified_base 8: mod_base = gm
  modified_base 9: mod_base = OTHER; note = 2'-fluoroadenosine
  modified_base 10: mod_base = OTHER; note = 2'-fluorocytidine
  modified_base 11: mod_base = OTHER; note = 2'-fluoroguanosine
  modified_base 12: mod_base = um
  modified_base 13: mod_base = gm
  modified_base 14: mod_base = gm
  modified_base 15: mod_base = OTHER; note = 2'-O-methyladenosine
  modified_base 16: mod_base = cm
  modified_base 17: mod_base = um
  modified_base 18: mod_base = um
  modified_base 19: mod_base = cm
  modified_base 20: mod_base = cm
  modified_base 21: mod_base = OTHER; note = 2'-O-methyladenosine
  source 1..21: mol_type = other RNA
gtggttcgacgtggacttcca

SEQ ID NO: 1333 - RNA, 21 nt, synthetic construct
  modified_base 1: mod_base = cm
  modified_base 1^2: mod_base = OTHER; note = phosphorothioate linkage
  modified_base 2: mod_base = OTHER; note = 2'-O-methyladenosine
  modified_base 3: mod_base = gm
  modified_base 4: mod_base = cm
  modified_base 5: mod_base = um
  modified_base 6: mod_base = um
  modified_base 7: mod_base = cm
  modified_base 8: mod_base = cm
  modified_base 9: mod_base = OTHER; note = 2'-fluoroadenosine
  modified_base 10: mod_base = OTHER; note = 2'-fluorocytidine
  modified_base 11: mod_base = OTHER; note = 2'-fluorouridine
  modified_base 12: mod_base = OTHER; note = 2'-O-methyladenosine
  modified_base 13: mod_base = cm
  modified_base 14: mod_base = OTHER; note = 2'-O-methyladenosine
  modified_base 15: mod_base = OTHER; note = 2'-O-methyladenosine
  modified_base 16: mod_base = OTHER; note = 2'-O-methylinosine
  modified_base 17: mod_base = OTHER; note = 2'-O-methyladenosine
  modified_base 18: mod_base = cm
  modified_base 19: mod_base = cm
  modified_base 20: mod_base = um
  modified_base 21: mod_base = um
  source 1..21: mol_type = other RNA
cagcttccactacaanacctt

SEQ ID NO: 1334 - RNA, 21 nt, synthetic construct
  modified_base 1: mod_base = cm
  modified_base 1^2: mod_base = OTHER; note = phosphorothioate linkage
  modified_base 2: mod_base = OTHER; note = 2'-O-methyladenosine
  modified_base 3: mod_base = gm
  modified_base 4: mod_base = cm
  modified_base 5: mod_base = um
  modified_base 6: mod_base = um
  modified_base 7: mod_base = cm
  modified_base 8: mod_base = cm
  modified_base 9: mod_base = OTHER; note = 2'-fluoroadenosine
  modified_base 10: mod_base = OTHER; note = 2'-fluorocytidine
  modified_base 11: mod_base = OTHER; note = 2'-fluorouridine
  modified_base 12: mod_base = OTHER; note = 2'-O-methyladenosine
  modified_base 13: mod_base = cm
  modified_base 14: mod_base = OTHER; note = 2'-O-methyladenosine
  modified_base 15: mod_base = OTHER; note = 2'-O-methyladenosine
  modified_base 16: mod_base = gm
  modified_base 17: mod_base = OTHER; note = 2'-O-methyladenosine
  modified_base 18: mod_base = cm
  modified_base 19: mod_base = cm
  modified_base 20: mod_base = um
  modified_base 21: mod_base = um
  source 1..21: mol_type = other RNA
cagcttccactacaagacctt

SEQ ID NO: 1335 - RNA, 21 nt, synthetic construct
  modified_base 1: mod_base = gm
  modified_base 1^2: mod_base = OTHER; note = phosphorothioate linkage
  modified_base 2: mod_base = OTHER; note = 2 -O-methyl-2-aminoadenosine
  modified_base 3: mod_base = OTHER; note = 2'-O-methyladenosine
  modified_base 4: mod_base = gm
  modified_base 5: mod_base = um
  modified_base 6: mod_base = OTHER; note = 2'-O-methyladenosine
  modified_base 7: mod_base = um
  modified_base 8: mod_base = gm
  modified_base 9: mod_base = OTHER; note = 2'-fluorocytidine
  modified_base 10: mod_base = OTHER; note = 2'-fluorouridine
  modified_base 11: mod_base = OTHER; note = 2'-fluorocytidine
  modified_base 12: mod_base = OTHER; note = 2'-O-methyladenosine
  modified_base 13: mod_base = gm
  modified_base 14: mod_base = cm
  modified_base 15: mod_base = OTHER; note = 2'-O-methyladenosine
  modified_base 16: mod_base = cm
  modified_base 17: mod_base = um
  modified_base 18: mod_base = gm
  modified_base 19: mod_base = OTHER; note = 2'-O-methylinosine
  modified_base 20: mod_base = um
  modified_base 21: mod_base = OTHER; note = 2'-O-methyladenosine
  source 1..21: mol_type = other RNA
gnagtatgctcagcactgnta

SEQ ID NO: 1336 - RNA, 21 nt, synthetic construct
  modified_base 1: mod_base = gm
  modified_base 1^2: mod_base = OTHER; note = phosphorothioate linkage
  modified_base 2: mod_base = OTHER; note = 2 -O-methyl-2-aminoadenosine
  modified_base 3: mod_base = OTHER; note = 2'-O-methyladenosine
  modified_base 4: mod_base = gm
  modified_base 5: mod_base = um
  modified_base 6: mod_base = OTHER; note = 2'-O-methyladenosine
  modified_base 7: mod_base = um
  modified_base 8: mod_base = gm
  modified_base 9: mod_base = OTHER; note = 2'-fluorocytidine
  modified_base 10: mod_base = OTHER; note = 2'-fluorouridine
  modified_base 11: mod_base = OTHER; note = 2'-fluorocytidine
  modified_base 12: mod_base = OTHER; note = 2'-O-methyladenosine
  modified_base 13: mod_base = gm
  modified_base 14: mod_base = um
  modified_base 15: mod_base = OTHER; note = 2'-O-methyladenosine
  modified_base 16: mod_base = cm
  modified_base 17: mod_base = um
  modified_base 18: mod_base = gm
  modified_base 19: mod_base = OTHER; note = 2'-O-methylinosine
  modified_base 20: mod_base = um
  modified_base 21: mod_base = OTHER; note = 2'-O-methyladenosine
  source 1..21: mol_type = other RNA
gnagtatgctcagtactgnta

SEQ ID NO: 1337 - RNA, 21 nt, synthetic construct
  modified_base 1: mod_base = gm
  modified_base 1^2: mod_base = OTHER; note = phosphorothioate linkage
  modified_base 2: mod_base = cm
  modified_base 3: mod_base = cm
  modified_base 4: mod_base = um
  modified_base 5: mod_base = um
  modified_base 6: mod_base = cm
  modified_base 7: mod_base = um
  modified_base 8: mod_base = um
  modified_base 9: mod_base = OTHER; note = 2'-fluorocytidine
  modified_base 10: mod_base = OTHER; note = 2'-fluoroadenosine
  modified_base 11: mod_base = OTHER; note = 2'-fluoroadenosine
  modified_base 12: mod_base = cm
  modified_base 13: mod_base = OTHER; note = 2'-O-methyladenosine
  modified_base 14: mod_base = cm
  modified_base 15: mod_base = cm
  modified_base 16: mod_base = um
  modified_base 17: mod_base = um
  modified_base 18: mod_base = cm
  modified_base 19: mod_base = OTHER; note = 2'-O-methyladenosine
  modified_base 20: mod_base = OTHER; note = 2'-O-methyladenosine
  modified_base 21: mod_base = OTHER; note = 2'-O-methyladenosine
  source 1..21: mol_type = other RNA
gccttcttcaacaccttcaaa

SEQ ID NO: 1338 - RNA, 21 nt, synthetic construct
  modified_base 1: mod_base = gm
  modified_base 1^2: mod_base = OTHER; note = phosphorothioate linkage
  modified_base 2: mod_base = cm
  modified_base 3: mod_base = cm
  modified_base 4: mod_base = um
  modified_base 5: mod_base = um
  modified_base 6: mod_base = cm
  modified_base 7: mod_base = um
  modified_base 8: mod_base = um
  modified_base 9: mod_base = OTHER; note = 2'-fluorocytidine
  modified_base 10: mod_base = OTHER; note = 2'-fluoroadenosine
  modified_base 11: mod_base = OTHER; note = 2'-fluoroadenosine
  modified_base 12: mod_base = cm
  modified_base 13: mod_base = OTHER; note = 2'-O-methyladenosine
  modified_base 14: mod_base = um
  modified_base 15: mod_base = cm
  modified_base 16: mod_base = um
  modified_base 17: mod_base = um
  modified_base 18: mod_base = cm
  modified_base 19: mod_base = OTHER; note = 2'-O-methyladenosine
  modified_base 20: mod_base = OTHER; note = 2'-O-methyladenosine
  modified_base 21: mod_base = OTHER; note = 2'-O-methyladenosine
  source 1..21: mol_type = other RNA
gccttcttcaacatcttcaaa

SEQ ID NO: 1339 - RNA, 21 nt, synthetic construct
  modified_base 1: mod_base = gm
  modified_base 1^2: mod_base = OTHER; note = phosphorothioate linkage
  modified_base 2: mod_base = cm
  modified_base 3: mod_base = cm
  modified_base 4: mod_base = um
  modified_base 5: mod_base = um
  modified_base 6: mod_base = cm
  modified_base 7: mod_base = um
  modified_base 8: mod_base = um
  modified_base 9: mod_base = OTHER; note = 2'-fluorocytidine
  modified_base 10: mod_base = OTHER; note = 2'-fluoroadenosine
  modified_base 11: mod_base = OTHER; note = 2'-fluoroadenosine
  modified_base 12: mod_base = cm
  modified_base 13: mod_base = OTHER; note = 2'-O-methyladenosine
  modified_base 14: mod_base = cm
  modified_base 15: mod_base = um
  modified_base 16: mod_base = um
  modified_base 17: mod_base = um
  modified_base 18: mod_base = cm
  modified_base 19: mod_base = OTHER; note = 2'-O-methyladenosine
  modified_base 20: mod_base = OTHER; note = 2'-O-methyladenosine
  modified_base 21: mod_base = OTHER; note = 2'-O-methyladenosine
  source 1..21: mol_type = other RNA
gccttcttcaacactttcaaa

SEQ ID NO: 1340 - RNA, 21 nt, synthetic construct
  modified_base 1: mod_base = gm
  modified_base 2: mod_base = gm
  modified_base 3: mod_base = gm
  modified_base 4: mod_base = OTHER; note = 2'-O-methyladenosine
  modified_base 5: mod_base = cm
  modified_base 6: mod_base = OTHER; note = 2'-O-methyladenosine
  modified_base 7: mod_base = OTHER; note = 2'-O-methyladenosine
  modified_base 8: mod_base = gm
  modified_base 9: mod_base = OTHER; note = 2'-fluoroadenosine
  modified_base 10: mod_base = OTHER; note = 2'-fluoroadenosine
  modified_base 11: mod_base = OTHER; note = 2'-fluoroguanosine
  modified_base 12: mod_base = OTHER; note = 2'-O-methyladenosine
  modified_base 13: mod_base = cm
  modified_base 14: mod_base = cm
  modified_base 15: mod_base = OTHER; note = 2'-O-methyladenosine
  modified_base 16: mod_base = OTHER; note = 2'-O-methylinosine
  modified_base 17: mod_base = cm
  modified_base 18: mod_base = OTHER; note = 2'-O-methyladenosine
  modified_base 19: mod_base = um
  modified_base 20: mod_base = cm
  modified_base 21: mod_base = um
  source 1..21: mol_type = other RNA
gggacaagaagaccancatct

SEQ ID NO: 1341 - RNA, 21 nt, synthetic construct
  modified_base 1: mod_base = gm
  modified_base 2: mod_base = gm
  modified_base 3: mod_base = OTHER; note = 2'-O-methyladenosine
  modified_base 4: mod_base = cm
  modified_base 5: mod_base = cm
  modified_base 6: mod_base = OTHER; note = 2'-O-methyladenosine
  modified_base 7: mod_base = gm
  modified_base 8: mod_base = cm
  modified_base 9: mod_base = OTHER; note = 2'-fluoroadenosine
  modified_base 10: mod_base = OTHER; note = 2'-fluorouridine
  modified_base 11: mod_base = OTHER; note = 2'-fluorocytidine
  modified_base 12: mod_base = um
  modified_base 13: mod_base = um
  modified_base 14: mod_base = cm
  modified_base 15: mod_base = OTHER; note = 2'-O-methyladenosine
  modified_base 16: mod_base = um
  modified_base 17: mod_base = cm
  modified_base 18: mod_base = OTHER; note = 2'-O-methyladenosine
  modified_base 19: mod_base = OTHER; note = 2'-O-methyladenosine
  modified_base 20: mod_base = cm
  modified_base 21: mod_base = OTHER; note = 2'-O-methyladenosine
  source 1..21: mol_type = other RNA
ggaccagcatcttcatcaaca

SEQ ID NO: 1342 - RNA, 21 nt, synthetic construct
  modified_base 1: mod_base = gm
  modified_base 2: mod_base = cm
  modified_base 3: mod_base = um
  modified_base 4: mod_base = gm
  modified_base 5: mod_base = OTHER; note = 2'-O-methyladenosine
  modified_base 6: mod_base = um
  modified_base 7: mod_base = um
  modified_base 8: mod_base = um
  modified_base 9: mod_base = OTHER; note = 2'-fluoroguanosine
  modified_base 10: mod_base = OTHER; note = 2'-fluorocytidine
  modified_base 11: mod_base = OTHER; note = 2'-fluorocytidine
  modified_base 12: mod_base = um
  modified_base 13: mod_base = gm
  modified_base 14: mod_base = OTHER; note = 2'-O-methyladenosine
  modified_base 15: mod_base = OTHER; note = 2'-O-methyladenosine
  modified_base 16: mod_base = cm
  modified_base 17: mod_base = OTHER; note = 2'-O-methyladenosine
  modified_base 18: mod_base = OTHER; note = 2'-O-methyladenosine
  modified_base 19: mod_base = gm
  modified_base 20: mod_base = OTHER; note = 2'-O-methyladenosine
  modified_base 21: mod_base = OTHER; note = 2'-O-methyladenosine
  source 1..21: mol_type = other RNA
gctgatttgcctgaacaagaa

SEQ ID NO: 1343 - RNA, 21 nt, synthetic construct
  modified_base 1: mod_base = cm
  modified_base 2: mod_base = OTHER; note = 2 -O-methyl-2-aminoadenosine
  modified_base 3: mod_base = OTHER; note = 2'-O-methyladenosine
  modified_base 4: mod_base = gm
  modified_base 5: mod_base = gm
  modified_base 6: mod_base = OTHER; note = 2'-O-methyladenosine
  modified_base 7: mod_base = OTHER; note = 2'-O-methyladenosine
  modified_base 8: mod_base = OTHER; note = 2'-O-methyladenosine
  modified_base 9: mod_base = OTHER; note = 2'-fluorocytidine
  modified_base 10: mod_base = OTHER; note = 2'-fluorocytidine
  modified_base 11: mod_base = OTHER; note = 2'-fluorouridine
  modified_base 12: mod_base = OTHER; note = 2'-O-methyladenosine
  modified_base 13: mod_base = cm
  modified_base 14: mod_base = OTHER; note = 2'-O-methyladenosine
  modified_base 15: mod_base = OTHER; note = 2'-O-methyladenosine
  modified_base 16: mod_base = cm
  modified_base 17: mod_base = OTHER; note = 2'-O-methyladenosine
  modified_base 18: mod_base = OTHER; note = 2'-O-methyladenosine
  modified_base 19: mod_base = cm
  modified_base 20: mod_base = OTHER; note = 2'-O-methyladenosine
  modified_base 21: mod_base = um
  source 1..21: mol_type = other RNA
cnaggaaacctacaacaacat

SEQ ID NO: 1344 - RNA, 21 nt, synthetic construct
  modified_base 1: mod_base = gm
  modified_base 2: mod_base = gm
  modified_base 3: mod_base = OTHER; note = 2'-O-methyladenosine
  modified_base 4: mod_base = OTHER; note = 2'-O-methyladenosine
  modified_base 5: mod_base = OTHER; note = 2'-O-methyladenosine
  modified_base 6: mod_base = cm
  modified_base 7: mod_base = cm
  modified_base 8: mod_base = um
  modified_base 9: mod_base = OTHER; note = 2'-fluoroadenosine
  modified_base 10: mod_base = OTHER; note = 2'-fluorocytidine
  modified_base 11: mod_base = OTHER; note = 2'-fluoroadenosine
  modified_base 12: mod_base = OTHER; note = 2'-O-methyladenosine
  modified_base 13: mod_base = cm
  modified_base 14: mod_base = OTHER; note = 2'-O-methyladenosine
  modified_base 15: mod_base = OTHER; note = 2'-O-methyladenosine
  modified_base 16: mod_base = cm
  modified_base 17: mod_base = OTHER; note = 2'-O-methyladenosine
  modified_base 18: mod_base = um
  modified_base 19: mod_base = cm
  modified_base 20: mod_base = OTHER; note = 2'-O-methyladenosine
  modified_base 21: mod_base = um
  source 1..21: mol_type = other RNA
ggaaacctacaacaacatcat

SEQ ID NO: 1345 - RNA, 21 nt, synthetic construct
  modified_base 1: mod_base = gm
  modified_base 2: mod_base = OTHER; note = 2 -O-methyl-2-aminoadenosine
  modified_base 3: mod_base = OTHER; note = 2'-O-methyladenosine
  modified_base 4: mod_base = gm
  modified_base 5: mod_base = OTHER; note = 2'-O-methyladenosine
  modified_base 6: mod_base = cm
  modified_base 7: mod_base = cm
  modified_base 8: mod_base = OTHER; note = 2'-O-methyladenosine
  modified_base 9: mod_base = OTHER; note = 2'-fluoroguanosine
  modified_base 10: mod_base = OTHER; note = 2'-fluorocytidine
  modified_base 11: mod_base = OTHER; note = 2'-fluoroadenosine
  modified_base 12: mod_base = um
  modified_base 13: mod_base = cm
  modified_base 14: mod_base = um
  modified_base 15: mod_base = um
  modified_base 16: mod_base = cm
  modified_base 17: mod_base = OTHER; note = 2'-O-methyladenosine
  modified_base 18: mod_base = um
  modified_base 19: mod_base = cm
  modified_base 20: mod_base = OTHER; note = 2'-O-methyladenosine
  modified_base 21: mod_base = OTHER; note = 2'-O-methyladenosine
  source 1..21: mol_type = other RNA
gnagaccagcatcttcatcaa

SEQ ID NO: 1346 - RNA, 21 nt, synthetic construct
  modified_base 1: mod_base = gm
  modified_base 2: mod_base = cm
  modified_base 3: mod_base = um
  modified_base 4: mod_base = gm
  modified_base 5: mod_base = cm
  modified_base 6: mod_base = um
  modified_base 7: mod_base = OTHER; note = 2'-O-methyladenosine
  modified_base 8: mod_base = cm
  modified_base 9: mod_base = OTHER; note = 2'-fluoroadenosine
  modified_base 10: mod_base = OTHER; note = 2'-fluoroadenosine
  modified_base 11: mod_base = OTHER; note = 2'-fluorocytidine
  modified_base 12: mod_base = um
  modified_base 13: mod_base = OTHER; note = 2'-O-methyladenosine
  modified_base 14: mod_base = cm
  modified_base 15: mod_base = cm
  modified_base 16: mod_base = OTHER; note = 2'-O-methyladenosine
  modified_base 17: mod_base = OTHER; note = 2'-O-methylinosine
  modified_base 18: mod_base = OTHER; note = 2'-O-methyladenosine
  modified_base 19: mod_base = um
  modified_base 20: mod_base = cm
  modified_base 21: mod_base = OTHER; note = 2'-O-methyladenosine
  source 1..21: mol_type = other RNA
gctgctacaactaccanatca

SEQ ID NO: 1347 - RNA, 21 nt, synthetic construct
  modified_base 1: mod_base = gm
  modified_base 2: mod_base = cm
  modified_base 3: mod_base = um
  modified_base 4: mod_base = OTHER; note = 2'-O-methyladenosine
  modified_base 5: mod_base = cm
  modified_base 6: mod_base = OTHER; note = 2'-O-methyladenosine
  modified_base 7: mod_base = OTHER; note = 2'-O-methyladenosine
  modified_base 8: mod_base = cm
  modified_base 9: mod_base = OTHER; note = 2'-fluorouridine
  modified_base 10: mod_base = OTHER; note = 2'-fluoroadenosine
  modified_base 11: mod_base = OTHER; note = 2'-fluorocytidine
  modified_base 12: mod_base = cm
  modified_base 13: mod_base = OTHER; note = 2'-O-methyladenosine
  modified_base 14: mod_base = gm
  modified_base 15: mod_base = OTHER; note = 2'-O-methyladenosine
  modified_base 16: mod_base = um
  modified_base 17: mod_base = cm
  modified_base 18: mod_base = OTHER; note = 2'-O-methyladenosine
  modified_base 19: mod_base = OTHER; note = 2'-O-methylinosine
  modified_base 20: mod_base = gm
  modified_base 21: mod_base = OTHER; note = 2'-O-methyladenosine
  source 1..21: mol_type = other RNA
gctacaactaccagatcanga

SEQ ID NO: 1348 - RNA, 21 nt, synthetic construct
  modified_base 1: mod_base = cm
  modified_base 2: mod_base = cm
  modified_base 3: mod_base = cm
  modified_base 4: mod_base = OTHER; note = 2'-O-methyladenosine
  modified_base 5: mod_base = cm
  modified_base 6: mod_base = cm
  modified_base 7: mod_base = cm
  modified_base 8: mod_base = OTHER; note = 2'-O-methyladenosine
  modified_base 9: mod_base = OTHER; note = 2'-fluorouridine
  modified_base 10: mod_base = OTHER; note = 2'-fluorocytidine
  modified_base 11: mod_base = OTHER; note = 2'-fluorouridine
  modified_base 12: mod_base = gm
  modified_base 13: mod_base = cm
  modified_base 14: mod_base = um
  modified_base 15: mod_base = OTHER; note = 2'-O-methyladenosine
  modified_base 16: mod_base = cm
  modified_base 17: mod_base = OTHER; note = 2'-O-methyladenosine
  modified_base 18: mod_base = OTHER; note = 2'-O-methyladenosine
  modified_base 19: mod_base = cm
  modified_base 20: mod_base = um
  modified_base 21: mod_base = OTHER; note = 2'-O-methyladenosine
  source 1..21: mol_type = other RNA
cccacccatctgctacaacta

SEQ ID NO: 1349 - RNA, 21 nt, synthetic construct
  modified_base 1: mod_base = gm
  modified_base 2: mod_base = OTHER; note = 2'-O-methyladenosine
  modified_base 3: mod_base = gm
  modified_base 4: mod_base = OTHER; note = 2'-O-methyladenosine
  modified_base 5: mod_base = um
  modified_base 6: mod_base = cm
  modified_base 7: mod_base = cm
  modified_base 8: mod_base = gm
  modified_base 9: mod_base = OTHER; note = 2'-fluorocytidine
  modified_base 10: mod_base = OTHER; note = 2'-fluoroadenosine
  modified_base 11: mod_base = OTHER; note = 2'-fluorouridine
  modified_base 12: mod_base = cm
  modified_base 13: mod_base = cm
  modified_base 14: mod_base = OTHER; note = 2'-O-methyladenosine
  modified_base 15: mod_base = gm
  modified_base 16: mod_base = um
  modified_base 17: mod_base = OTHER; note = 2'-O-methylinosine
  modified_base 18: mod_base = um
  modified_base 19: mod_base = um
  modified_base 20: mod_base = gm
  modified_base 21: mod_base = OTHER; note = 2'-O-methyladenosine
  source 1..21: mol_type = other RNA
gagatccgcatccagtnttga

SEQ ID NO: 1350 - RNA, 21 nt, synthetic construct
  modified_base 1: mod_base = cm
  modified_base 2: mod_base = cm
  modified_base 3: mod_base = OTHER; note = 2'-O-methyladenosine
  modified_base 4: mod_base = gm
  modified_base 5: mod_base = OTHER; note = 2'-O-methyladenosine
  modified_base 6: mod_base = gm
  modified_base 7: mod_base = gm
  modified_base 8: mod_base = um
  modified_base 9: mod_base = OTHER; note = 2'-fluoroguanosine
  modified_base 10: mod_base = OTHER; note = 2'-fluoroadenosine
  modified_base 11: mod_base = OTHER; note = 2'-fluoroguanosine
  modified_base 12: mod_base = cm
  modified_base 13: mod_base = OTHER; note = 2'-O-methyladenosine
  modified_base 14: mod_base = um
  modified_base 15: mod_base = cm
  modified_base 16: mod_base = OTHER; note = 2'-O-methylinosine
  modified_base 17: mod_base = OTHER; note = 2'-O-methyladenosine
  modified_base 18: mod_base = OTHER; note = 2'-O-methyladenosine
  modified_base 19: mod_base = cm
  modified_base 20: mod_base = OTHER; note = 2'-O-methyladenosine
  modified_base 21: mod_base = OTHER; note = 2'-O-methyladenosine
  source 1..21: mol_type = other RNA
ccagaggtgagcatcnaacaa

SEQ ID NO: 1351 - RNA, 21 nt, synthetic construct
  modified_base 1: mod_base = cm
  modified_base 2: mod_base = OTHER; note = 2'-O-methyladenosine
  modified_base 3: mod_base = gm
  modified_base 4: mod_base = cm
  modified_base 5: mod_base = OTHER; note = 2'-O-methyladenosine
  modified_base 6: mod_base = gm
  modified_base 7: mod_base = gm
  modified_base 8: mod_base = gm
  modified_base 9: mod_base = OTHER; note = 2'-fluoroadenosine
  modified_base 10: mod_base = OTHER; note = 2'-fluorocytidine
  modified_base 11: mod_base = OTHER; note = 2'-fluorocytidine
  modified_base 12: mod_base = cm
  modified_base 13: mod_base = um
  modified_base 14: mod_base = um
  modified_base 15: mod_base = cm
  modified_base 16: mod_base = OTHER; note = 2'-O-methyladenosine
  modified_base 17: mod_base = OTHER; note = 2'-O-methyladenosine
  modified_base 18: mod_base = gm
  modified_base 19: mod_base = OTHER; note = 2'-O-methyladenosine
  modified_base 20: mod_base = um
  modified_base 21: mod_base = OTHER; note = 2'-O-methyladenosine
  source 1..21: mol_type = other RNA
cagcagggacccttcaagata

SEQ ID NO: 1352 - RNA, 21 nt, synthetic construct
  modified_base 1: mod_base = cm
  modified_base 2: mod_base = OTHER; note = 2 -O-methyl-2-aminoadenosine
  modified_base 3: mod_base = OTHER; note = 2'-O-methyladenosine
  modified_base 4: mod_base = gm
  modified_base 5: mod_base = OTHER; note = 2'-O-methyladenosine
  modified_base 6: mod_base = um
  modified_base 7: mod_base = gm
  modified_base 8: mod_base = um
  modified_base 9: mod_base = OTHER; note = 2'-fluoroguanosine
  modified_base 10: mod_base = OTHER; note = 2'-fluorocytidine
  modified_base 11: mod_base = OTHER; note = 2'-fluorocytidine
  modified_base 12: mod_base = um
  modified_base 13: mod_base = cm
  modified_base 14: mod_base = OTHER; note = 2'-O-methyladenosine
  modified_base 15: mod_base = OTHER; note = 2'-O-methyladenosine
  modified_base 16: mod_base = cm
  modified_base 17: mod_base = um
  modified_base 18: mod_base = OTHER; note = 2'-O-methyladenosine
  modified_base 19: mod_base = cm
  modified_base 20: mod_base = OTHER; note = 2'-O-methylinosine
  modified_base 21: mod_base = OTHER; note = 2'-O-methyladenosine
  source 1..21: mol_type = other RNA
cnagatgtgcctcaactacna

SEQ ID NO: 1353 - RNA, 21 nt, synthetic construct
  modified_base 1: mod_base = gm
  modified_base 2: mod_base = gm
  modified_base 3: mod_base = OTHER; note = 2'-O-methyladenosine
  modified_base 4: mod_base = um
  modified_base 5: mod_base = gm
  modified_base 6: mod_base = um
  modified_base 7: mod_base = gm
  modified_base 8: mod_base = cm
  modified_base 9: mod_base = OTHER; note = 2'-fluorocytidine
  modified_base 10: mod_base = OTHER; note = 2'-fluorouridine
  modified_base 11: mod_base = OTHER; note = 2'-fluorocytidine
  modified_base 12: mod_base = OTHER; note = 2'-O-methyladenosine
  modified_base 13: mod_base = OTHER; note = 2'-O-methyladenosine
  modified_base 14: mod_base = cm
  modified_base 15: mod_base = um
  modified_base 16: mod_base = OTHER; note = 2'-O-methyladenosine
  modified_base 17: mod_base = cm
  modified_base 18: mod_base = OTHER; note = 2'-O-methylinosine
  modified_base 19: mod_base = OTHER; note = 2'-O-methyladenosine
  modified_base 20: mod_base = gm
  modified_base 21: mod_base = OTHER; note = 2'-O-methyladenosine
  source 1..21: mol_type = other RNA
ggatgtgcctcaactacnaga

SEQ ID NO: 1354 - RNA, 21 nt, synthetic construct
  modified_base 1: mod_base = cm
  modified_base 2: mod_base = OTHER; note = 2'-O-methyladenosine
  modified_base 3: mod_base = gm
  modified_base 4: mod_base = cm
  modified_base 5: mod_base = um
  modified_base 6: mod_base = um
  modified_base 7: mod_base = cm
  modified_base 8: mod_base = cm
  modified_base 9: mod_base = OTHER; note = 2'-fluoroadenosine
  modified_base 10: mod_base = OTHER; note = 2'-fluorocytidine
  modified_base 11: mod_base = OTHER; note = 2'-fluorouridine
  modified_base 12: mod_base = OTHER; note = 2'-O-methyladenosine
  modified_base 13: mod_base = cm
  modified_base 14: mod_base = OTHER; note = 2'-O-methyladenosine
  modified_base 15: mod_base = OTHER; note = 2'-O-methyladenosine
  modified_base 16: mod_base = OTHER; note = 2'-O-methylinosine
  modified_base 17: mod_base = OTHER; note = 2'-O-methyladenosine
  modified_base 18: mod_base = cm
  modified_base 19: mod_base = cm
  modified_base 20: mod_base = um
  modified_base 21: mod_base = um
  source 1..21: mol_type = other RNA
cagcttccactacaanacctt

SEQ ID NO: 1355 - RNA, 21 nt, synthetic construct
  modified_base 1: mod_base = gm
  modified_base 2: mod_base = OTHER; note = 2'-O-methyladenosine
  modified_base 3: mod_base = cm
  modified_base 4: mod_base = OTHER; note = 2'-O-methyladenosine
  modified_base 5: mod_base = gm
  modified_base 6: mod_base = cm
  modified_base 7: mod_base = gm
  modified_base 8: mod_base = OTHER; note = 2'-O-methyladenosine
  modified_base 9: mod_base = OTHER; note = 2'-fluoroguanosine
  modified_base 10: mod_base = OTHER; note = 2'-fluoroadenosine
  modified_base 11: mod_base = OTHER; note = 2'-fluorocytidine
  modified_base 12: mod_base = cm
  modified_base 13: mod_base = um
  modified_base 14: mod_base = gm
  modified_base 15: mod_base = cm
  modified_base 16: mod_base = um
  modified_base 17: mod_base = um
  modified_base 18: mod_base = gm
  modified_base 19: mod_base = OTHER; note = 2'-O-methyladenosine
  modified_base 20: mod_base = OTHER; note = 2'-O-methyladenosine
  modified_base 21: mod_base = OTHER; note = 2'-O-methyladenosine
  source 1..21: mol_type = other RNA
gacagcgagacctgcttgaaa

SEQ ID NO: 1356 - RNA, 21 nt, synthetic construct
  modified_base 1: mod_base = cm
  modified_base 2: mod_base = cm
  modified_base 3: mod_base = OTHER; note = 2'-O-methyladenosine
  modified_base 4: mod_base = OTHER; note = 2'-O-methyladenosine
  modified_base 5: mod_base = cm
  modified_base 6: mod_base = gm
  modified_base 7: mod_base = um
  modified_base 8: mod_base = cm
  modified_base 9: mod_base = OTHER; note = 2'-fluoroadenosine
  modified_base 10: mod_base = OTHER; note = 2'-fluorocytidine
  modified_base 11: mod_base = OTHER; note = 2'-fluorocytidine
  modified_base 12: mod_base = OTHER; note = 2'-O-methyladenosine
  modified_base 13: mod_base = um
  modified_base 14: mod_base = cm
  modified_base 15: mod_base = um
  modified_base 16: mod_base = um
  modified_base 17: mod_base = cm
  modified_base 18: mod_base = OTHER; note = 2'-O-methyladenosine
  modified_base 19: mod_base = gm
  modified_base 20: mod_base = OTHER; note = 2'-O-methyladenosine
  modified_base 21: mod_base = OTHER; note = 2'-O-methyladenosine
  source 1..21: mol_type = other RNA
ccaacgtcaccatcttcagaa

SEQ ID NO: 1357 - RNA, 21 nt, synthetic construct
  modified_base 1: mod_base = cm
  modified_base 2: mod_base = OTHER; note = 2 -O-methyl-2-aminoadenosine
  modified_base 3: mod_base = OTHER; note = 2'-O-methyladenosine
  modified_base 4: mod_base = cm
  modified_base 5: mod_base = gm
  modified_base 6: mod_base = um
  modified_base 7: mod_base = cm
  modified_base 8: mod_base = OTHER; note = 2'-O-methyladenosine
  modified_base 9: mod_base = OTHER; note = 2'-fluorocytidine
  modified_base 10: mod_base = OTHER; note = 2'-fluorocytidine
  modified_base 11: mod_base = OTHER; note = 2'-fluoroadenosine
  modified_base 12: mod_base = um
  modified_base 13: mod_base = cm
  modified_base 14: mod_base = um
  modified_base 15: mod_base = um
  modified_base 16: mod_base = cm
  modified_base 17: mod_base = OTHER; note = 2'-O-methyladenosine
  modified_base 18: mod_base = OTHER; note = 2'-O-methylinosine
  modified_base 19: mod_base = OTHER; note = 2'-O-methyladenosine
  modified_base 20: mod_base = cm
  modified_base 21: mod_base = OTHER; note = 2'-O-methyladenosine
  source 1..21: mol_type = other RNA
cnacgtcaccatcttcanaca

SEQ ID NO: 1358 - RNA, 21 nt, synthetic construct
  modified_base 1: mod_base = cm
  modified_base 2: mod_base = OTHER; note = 2'-O-methyladenosine
  modified_base 3: mod_base = um
  modified_base 4: mod_base = cm
  modified_base 5: mod_base = cm
  modified_base 6: mod_base = OTHER; note = 2'-O-methyladenosine
  modified_base 7: mod_base = gm
  modified_base 8: mod_base = gm
  modified_base 9: mod_base = OTHER; note = 2'-fluorocytidine
  modified_base 10: mod_base = OTHER; note = 2'-fluorocytidine
  modified_base 11: mod_base = OTHER; note = 2'-fluoroguanosine
  modified_base 12: mod_base = OTHER; note = 2'-O-methyladenosine
  modified_base 13: mod_base = um
  modified_base 14: mod_base = gm
  modified_base 15: mod_base = OTHER; note = 2'-O-methyladenosine
  modified_base 16: mod_base = cm
  modified_base 17: mod_base = um
  modified_base 18: mod_base = um
  modified_base 19: mod_base = cm
  modified_base 20: mod_base = cm
  modified_base 21: mod_base = OTHER; note = 2'-O-methyladenosine
  source 1..21: mol_type = other RNA
catccaggccgatgacttcca

SEQ ID NO: 1359 - RNA, 21 nt, synthetic construct
  modified_base 1: mod_base = gm
  modified_base 2: mod_base = cm
  modified_base 3: mod_base = cm
  modified_base 4: mod_base = um
  modified_base 5: mod_base = um
  modified_base 6: mod_base = cm
  modified_base 7: mod_base = um
  modified_base 8: mod_base = um
  modified_base 9: mod_base = OTHER; note = 2'-fluorocytidine
  modified_base 10: mod_base = OTHER; note = 2'-fluoroadenosine
  modified_base 11: mod_base = OTHER; note = 2'-fluoroadenosine
  modified_base 12: mod_base = cm
  modified_base 13: mod_base = OTHER; note = 2'-O-methyladenosine
  modified_base 14: mod_base = cm
  modified_base 15: mod_base = cm
  modified_base 16: mod_base = um
  modified_base 17: mod_base = um
  modified_base 18: mod_base = cm
  modified_base 19: mod_base = OTHER; note = 2'-O-methyladenosine
  modified_base 20: mod_base = OTHER; note = 2'-O-methyladenosine
  modified_base 21: mod_base = OTHER; note = 2'-O-methyladenosine
  source 1..21: mol_type = other RNA
gccttcttcaacaccttcaaa

SEQ ID NO: 1360 - RNA, 21 nt, synthetic construct
  modified_base 1: mod_base = gm
  modified_base 2: mod_base = OTHER; note = 2 -O-methyl-2-aminoadenosine
  modified_base 3: mod_base = OTHER; note = 2'-O-methyladenosine
  modified_base 4: mod_base = gm
  modified_base 5: mod_base = um
  modified_base 6: mod_base = OTHER; note = 2'-O-methyladenosine
  modified_base 7: mod_base = um
  modified_base 8: mod_base = gm
  modified_base 9: mod_base = OTHER; note = 2'-fluorocytidine
  modified_base 10: mod_base = OTHER; note = 2'-fluorouridine
  modified_base 11: mod_base = OTHER; note = 2'-fluorocytidine
  modified_base 12: mod_base = OTHER; note = 2'-O-methyladenosine
  modified_base 13: mod_base = gm
  modified_base 14: mod_base = cm
  modified_base 15: mod_base = OTHER; note = 2'-O-methyladenosine
  modified_base 16: mod_base = cm
  modified_base 17: mod_base = um
  modified_base 18: mod_base = gm
  modified_base 19: mod_base = OTHER; note = 2'-O-methylinosine
  modified_base 20: mod_base = um
  modified_base 21: mod_base = OTHER; note = 2'-O-methyladenosine
  source 1..21: mol_type = other RNA
gnagtatgctcagcactgnta

SEQ ID NO: 1361 - RNA, 21 nt, synthetic construct
  modified_base 1: mod_base = gm
  modified_base 2: mod_base = OTHER; note = 2 -O-methyl-2-aminoadenosine
  modified_base 3: mod_base = OTHER; note = 2'-O-methyladenosine
  modified_base 4: mod_base = cm
  modified_base 5: mod_base = cm
  modified_base 6: mod_base = um
  modified_base 7: mod_base = OTHER; note = 2'-O-methyladenosine
  modified_base 8: mod_base = cm
  modified_base 9: mod_base = OTHER; note = 2'-fluorouridine
  modified_base 10: mod_base = OTHER; note = 2'-fluoroadenosine
  modified_base 11: mod_base = OTHER; note = 2'-fluorocytidine
  modified_base 12: mod_base = um
  modified_base 13: mod_base = cm
  modified_base 14: mod_base = gm
  modified_base 15: mod_base = OTHER; note = 2'-O-methyladenosine
  modified_base 16: mod_base = OTHER; note = 2'-O-methyladenosine
  modified_base 17: mod_base = cm
  modified_base 18: mod_base = um
  modified_base 19: mod_base = OTHER; note = 2'-O-methylinosine
  modified_base 20: mod_base = cm
  modified_base 21: mod_base = OTHER; note = 2'-O-methyladenosine
  source 1..21: mol_type = other RNA
gnacctactactcgaactnca

SEQ ID NO: 1362 - RNA, 21 nt, synthetic construct
  modified_base 1: mod_base = OTHER; note = 2'-O-methyladenosine
  modified_base 2: mod_base = cm
  modified_base 3: mod_base = OTHER; note = 2'-O-methyladenosine
  modified_base 4: mod_base = gm
  modified_base 5: mod_base = gm
  modified_base 6: mod_base = gm
  modified_base 7: mod_base = OTHER; note = 2'-O-methyladenosine
  modified_base 8: mod_base = cm
  modified_base 9: mod_base = OTHER; note = 2'-fluorocytidine
  modified_base 10: mod_base = OTHER; note = 2'-fluoroadenosine
  modified_base 11: mod_base = OTHER; note = 2'-fluorocytidine
  modified_base 12: mod_base = cm
  modified_base 13: mod_base = um
  modified_base 14: mod_base = gm
  modified_base 15: mod_base = cm
  modified_base 16: mod_base = um
  modified_base 17: mod_base = um
  modified_base 18: mod_base = cm
  modified_base 19: mod_base = OTHER; note = 2'-O-methyladenosine
  modified_base 20: mod_base = OTHER; note = 2'-O-methyladenosine
  modified_base 21: mod_base = OTHER; note = 2'-O-methyladenosine
  source 1..21: mol_type = other RNA
acagggaccacctgcttcaaa

SEQ ID NO: 1363 - RNA, 21 nt, synthetic construct
  modified_base 1: mod_base = cm
  modified_base 2: mod_base = cm
  modified_base 3: mod_base = um
  modified_base 4: mod_base = gm
  modified_base 5: mod_base = cm
  modified_base 6: mod_base = um
  modified_base 7: mod_base = cm
  modified_base 8: mod_base = cm
  modified_base 9: mod_base = OTHER; note = 2'-fluoroadenosine
  modified_base 10: mod_base = OTHER; note = 2'-fluoroadenosine
  modified_base 11: mod_base = OTHER; note = 2'-fluoroguanosine
  modified_base 12: mod_base = gm
  modified_base 13: mod_base = cm
  modified_base 14: mod_base = um
  modified_base 15: mod_base = OTHER; note = 2'-O-methyladenosine
  modified_base 16: mod_base = um
  modified_base 17: mod_base = cm
  modified_base 18: mod_base = OTHER; note = 2'-O-methyladenosine
  modified_base 19: mod_base = OTHER; note = 2'-O-methyladenosine
  modified_base 20: mod_base = gm
  modified_base 21: mod_base = OTHER; note = 2'-O-methyladenosine
  source 1..21: mol_type = other RNA
cctgctccaaggctatcaaga

SEQ ID NO: 1364 - RNA, 21 nt, synthetic construct
  modified_base 1: mod_base = cm
  modified_base 2: mod_base = OTHER; note = 2 -O-methyl-2-aminoadenosine
  modified_base 3: mod_base = um
  modified_base 4: mod_base = gm
  modified_base 5: mod_base = um
  modified_base 6: mod_base = gm
  modified_base 7: mod_base = gm
  modified_base 8: mod_base = OTHER; note = 2'-O-methyladenosine
  modified_base 9: mod_base = OTHER; note = 2'-fluoroadenosine
  modified_base 10: mod_base = OTHER; note = 2'-fluorocytidine
  modified_base 11: mod_base = OTHER; note = 2'-fluorocytidine
  modified_base 12: mod_base = OTHER; note = 2'-O-methyladenosine
  modified_base 13: mod_base = cm
  modified_base 14: mod_base = gm
  modified_base 15: mod_base = OTHER; note = 2'-O-methyladenosine
  modified_base 16: mod_base = um
  modified_base 17: mod_base = OTHER; note = 2'-O-methylinosine
  modified_base 18: mod_base = OTHER; note = 2'-O-methyladenosine
  modified_base 19: mod_base = cm
  modified_base 20: mod_base = OTHER; note = 2'-O-methyladenosine
  modified_base 21: mod_base = OTHER; note = 2'-O-methyladenosine
  source 1..21: mol_type = other RNA
cntgtggaaccacgatnacaa

SEQ ID NO: 1365 - RNA, 21 nt, synthetic construct
  modified_base 1: mod_base = OTHER; note = 2'-O-methyladenosine
  modified_base 2: mod_base = gm
  modified_base 3: mod_base = gm
  modified_base 4: mod_base = cm
  modified_base 5: mod_base = OTHER; note = 2'-O-methyladenosine
  modified_base 6: mod_base = OTHER; note = 2'-O-methyladenosine
  modified_base 7: mod_base = gm
  modified_base 8: mod_base = OTHER; note = 2'-O-methyladenosine
  modified_base 9: mod_base = OTHER; note = 2'-fluorocytidine
  modified_base 10: mod_base = OTHER; note = 2'-fluorocytidine
  modified_base 11: mod_base = OTHER; note = 2'-fluorouridine
  modified_base 12: mod_base = cm
  modified_base 13: mod_base = um
  modified_base 14: mod_base = gm
  modified_base 15: mod_base = cm
  modified_base 16: mod_base = um
  modified_base 17: mod_base = um
  modified_base 18: mod_base = cm
  modified_base 19: mod_base = um
  modified_base 20: mod_base = OTHER; note = 2'-O-methylinosine
  modified_base 21: mod_base = um
  source 1..21: mol_type = other RNA
aggcaagacctctgcttctnt

SEQ ID NO: 1366 - RNA, 21 nt, synthetic construct
  modified_base 1: mod_base = um
  modified_base 2: mod_base = cm
  modified_base 3: mod_base = cm
  modified_base 4: mod_base = OTHER; note = 2'-O-methyladenosine
  modified_base 5: mod_base = cm
  modified_base 6: mod_base = OTHER; note = 2'-O-methyladenosine
  modified_base 7: mod_base = gm
  modified_base 8: mod_base = OTHER; note = 2'-O-methyladenosine
  modified_base 9: mod_base = OTHER; note = 2'-fluorocytidine
  modified_base 10: mod_base = OTHER; note = 2'-fluorouridine
  modified_base 11: mod_base = OTHER; note = 2'-fluoroguanosine
  modified_base 12: mod_base = cm
  modified_base 13: mod_base = OTHER; note = 2'-O-methyladenosine
  modified_base 14: mod_base = cm
  modified_base 15: mod_base = cm
  modified_base 16: mod_base = OTHER; note = 2'-O-methyladenosine
  modified_base 17: mod_base = OTHER; note = 2'-O-methyladenosine
  modified_base 18: mod_base = cm
  modified_base 19: mod_base = um
  modified_base 20: mod_base = OTHER; note = 2'-O-methylinosine
  modified_base 21: mod_base = OTHER; note = 2'-O-methyladenosine
  source 1..21: mol_type = other RNA
tccacagactgcaccaactna

SEQ ID NO: 1367 - RNA, 21 nt, synthetic construct
  modified_base 1: mod_base = gm
  modified_base 2: mod_base = cm
  modified_base 3: mod_base = OTHER; note = 2'-O-methyladenosine
  modified_base 4: mod_base = gm
  modified_base 5: mod_base = um
  modified_base 6: mod_base = gm
  modified_base 7: mod_base = cm
  modified_base 8: mod_base = cm
  modified_base 9: mod_base = OTHER; note = 2'-fluorouridine
  modified_base 10: mod_base = OTHER; note = 2'-fluorouridine
  modified_base 11: mod_base = OTHER; note = 2'-fluorocytidine
  modified_base 12: mod_base = OTHER; note = 2'-O-methyladenosine
  modified_base 13: mod_base = cm
  modified_base 14: mod_base = um
  modified_base 15: mod_base = gm
  modified_base 16: mod_base = um
  modified_base 17: mod_base = OTHER; note = 2'-O-methyladenosine
  modified_base 18: mod_base = cm
  modified_base 19: mod_base = um
  modified_base 20: mod_base = OTHER; note = 2'-O-methylinosine
  modified_base 21: mod_base = OTHER; note = 2'-O-methyladenosine
  source 1..21: mol_type = other RNA
gcagtgccttcactgtactna

SEQ ID NO: 1368 - RNA, 21 nt, synthetic construct
  modified_base 1: mod_base = gm
  modified_base 2: mod_base = cm
  modified_base 3: mod_base = um
  modified_base 4: mod_base = gm
  modified_base 5: mod_base = um
  modified_base 6: mod_base = gm
  modified_base 7: mod_base = gm
  modified_base 8: mod_base = gm
  modified_base 9: mod_base = OTHER; note = 2'-fluoroadenosine
  modified_base 10: mod_base = OTHER; note = 2'-fluoroadenosine
  modified_base 11: mod_base = OTHER; note = 2'-fluorocytidine
  modified_base 12: mod_base = um
  modified_base 13: mod_base = um
  modified_base 14: mod_base = cm
  modified_base 15: mod_base = OTHER; note = 2'-O-methyladenosine
  modified_base 16: mod_base = OTHER; note = 2'-O-methyladenosine
  modified_base 17: mod_base = cm
  modified_base 18: mod_base = OTHER; note = 2'-O-methyladenosine
  modified_base 19: mod_base = OTHER; note = 2'-O-methylinosine
  modified_base 20: mod_base = cm
  modified_base 21: mod_base = OTHER; note = 2'-O-methyladenosine
  source 1..21: mol_type = other RNA
gctgtgggaacttcaacanca

SEQ ID NO: 1369 - RNA, 21 nt, synthetic construct
  modified_base 1: mod_base = gm
  modified_base 2: mod_base = um
  modified_base 3: mod_base = gm
  modified_base 4: mod_base = gm
  modified_base 5: mod_base = gm
  modified_base 6: mod_base = OTHER; note = 2'-O-methyladenosine
  modified_base 7: mod_base = OTHER; note = 2'-O-methyladenosine
  modified_base 8: mod_base = cm
  modified_base 9: mod_base = OTHER; note = 2'-fluorouridine
  modified_base 10: mod_base = OTHER; note = 2'-fluorouridine
  modified_base 11: mod_base = OTHER; note = 2'-fluorocytidine
  modified_base 12: mod_base = OTHER; note = 2'-O-methyladenosine
  modified_base 13: mod_base = OTHER; note = 2'-O-methyladenosine
  modified_base 14: mod_base = cm
  modified_base 15: mod_base = OTHER; note = 2'-O-methyladenosine
  modified_base 16: mod_base = OTHER; note = 2'-O-methylinosine
  modified_base 17: mod_base = cm
  modified_base 18: mod_base = OTHER; note = 2'-O-methyladenosine
  modified_base 19: mod_base = um
  modified_base 20: mod_base = cm
  modified_base 21: mod_base = OTHER; note = 2'-O-methyladenosine
  source 1..21: mol_type = other RNA
gtgggaacttcaacancatca

SEQ ID NO: 1370 - RNA, 21 nt, synthetic construct
  modified_base 1: mod_base = gm
  modified_base 2: mod_base = cm
  modified_base 3: mod_base = um
  modified_base 4: mod_base = um
  modified_base 5: mod_base = cm
  modified_base 6: mod_base = OTHER; note = 2'-O-methyladenosine
  modified_base 7: mod_base = OTHER; note = 2'-O-methyladenosine
  modified_base 8: mod_base = cm
  modified_base 9: mod_base = OTHER; note = 2'-fluoroadenosine
  modified_base 10: mod_base = OTHER; note = 2'-fluorocytidine
  modified_base 11: mod_base = OTHER; note = 2'-fluorocytidine
  modified_base 12: mod_base = um
  modified_base 13: mod_base = um
  modified_base 14: mod_base = cm
  modified_base 15: mod_base = OTHER; note = 2'-O-methyladenosine
  modified_base 16: mod_base = OTHER; note = 2'-O-methyladenosine
  modified_base 17: mod_base = OTHER; note = 2'-O-methylinosine
  modified_base 18: mod_base = OTHER; note = 2'-O-methyladenosine
  modified_base 19: mod_base = cm
  modified_base 20: mod_base = cm
  modified_base 21: mod_base = OTHER; note = 2'-O-methyladenosine
  source 1..21: mol_type = other RNA
gcttcaacaccttcaanacca

SEQ ID NO: 1371 - RNA, 21 nt, synthetic construct
  modified_base 1: mod_base = cm
  modified_base 2: mod_base = cm
  modified_base 3: mod_base = cm
  modified_base 4: mod_base = cm
  modified_base 5: mod_base = OTHER; note = 2'-O-methyladenosine
  modified_base 6: mod_base = OTHER; note = 2'-O-methyladenosine
  modified_base 7: mod_base = cm
  modified_base 8: mod_base = OTHER; note = 2'-O-methyladenosine
  modified_base 9: mod_base = OTHER; note = 2'-fluorouridine
  modified_base 10: mod_base = OTHER; note = 2'-fluorocytidine
  modified_base 11: mod_base = OTHER; note = 2'-fluoroadenosine
  modified_base 12: mod_base = gm
  modified_base 13: mod_base = gm
  modified_base 14: mod_base = OTHER; note = 2'-O-methyladenosine
  modified_base 15: mod_base = OTHER; note = 2'-O-methyladenosine
  modified_base 16: mod_base = cm
  modified_base 17: mod_base = OTHER; note = 2'-O-methyladenosine
  modified_base 18: mod_base = OTHER; note = 2'-O-methylinosine
  modified_base 19: mod_base = cm
  modified_base 20: mod_base = um
  modified_base 21: mod_base = um
  source 1..21: mol_type = other RNA
ccccaacatcaggaacanctt

SEQ ID NO: 1372 - RNA, 21 nt, synthetic construct
  modified_base 1: mod_base = cm
  modified_base 2: mod_base = cm
  modified_base 3: mod_base = um
  modified_base 4: mod_base = OTHER; note = 2'-O-methyladenosine
  modified_base 5: mod_base = cm
  modified_base 6: mod_base = um
  modified_base 7: mod_base = OTHER; note = 2'-O-methyladenosine
  modified_base 8: mod_base = cm
  modified_base 9: mod_base = OTHER; note = 2'-fluorouridine
  modified_base 10: mod_base = OTHER; note = 2'-fluorocytidine
  modified_base 11: mod_base = OTHER; note = 2'-fluoroguanosine
  modified_base 12: mod_base = OTHER; note = 2'-O-methyladenosine
  modified_base 13: mod_base = OTHER; note = 2'-O-methyladenosine
  modified_base 14: mod_base = cm
  modified_base 15: mod_base = um
  modified_base 16: mod_base = OTHER; note = 2'-O-methylinosine
  modified_base 17: mod_base = cm
  modified_base 18: mod_base = OTHER; note = 2'-O-methyladenosine
  modified_base 19: mod_base = um
  modified_base 20: mod_base = gm
  modified_base 21: mod_base = um
  source 1..21: mol_type = other RNA
cctactactcgaactncatgt

SEQ ID NO: 1373 - RNA, 21 nt, synthetic construct
  modified_base 1: mod_base = gm
  modified_base 2: mod_base = um
  modified_base 3: mod_base = cm
  modified_base 4: mod_base = OTHER; note = 2'-O-methyladenosine
  modified_base 5: mod_base = cm
  modified_base 6: mod_base = cm
  modified_base 7: mod_base = um
  modified_base 8: mod_base = gm
  modified_base 9: mod_base = OTHER; note = 2'-fluorocytidine
  modified_base 10: mod_base = OTHER; note = 2'-fluoroadenosine
  modified_base 11: mod_base = OTHER; note = 2'-fluoroguanosine
  modified_base 12: mod_base = um
  modified_base 13: mod_base = gm
  modified_base 14: mod_base = um
  modified_base 15: mod_base = um
  modified_base 16: mod_base = gm
  modified_base 17: mod_base = OTHER; note = 2'-O-methylinosine
  modified_base 18: mod_base = cm
  modified_base 19: mod_base = um
  modified_base 20: mod_base = um
  modified_base 21: mod_base = OTHER; note = 2'-O-methyladenosine
  source 1..21: mol_type = other RNA
gtcacctgcagtgttgnctta

SEQ ID NO: 1374 - RNA, 21 nt, synthetic construct
  modified_base 1: mod_base = gm
  modified_base 2: mod_base = cm
  modified_base 3: mod_base = um
  modified_base 4: mod_base = gm
  modified_base 5: mod_base = gm
  modified_base 6: mod_base = OTHER; note = 2'-O-methyladenosine
  modified_base 7: mod_base = cm
  modified_base 8: mod_base = OTHER; note = 2'-O-methyladenosine
  modified_base 9: mod_base = OTHER; note = 2'-fluorouridine
  modified_base 10: mod_base = OTHER; note = 2'-fluoroguanosine
  modified_base 11: mod_base = OTHER; note = 2'-fluoroadenosine
  modified_base 12: mod_base = cm
  modified_base 13: mod_base = cm
  modified_base 14: mod_base = um
  modified_base 15: mod_base = gm
  modified_base 16: mod_base = um
  modified_base 17: mod_base = um
  modified_base 18: mod_base = OTHER; note = 2'-O-methyladenosine
  modified_base 19: mod_base = cm
  modified_base 20: mod_base = OTHER; note = 2'-O-methyladenosine
  modified_base 21: mod_base = OTHER; note = 2'-O-methyladenosine
  source 1..21: mol_type = other RNA
gctggacatgacctgttacaa

SEQ ID NO: 1375 - RNA, 21 nt, synthetic construct
  modified_base 1: mod_base = gm
  modified_base 2: mod_base = cm
  modified_base 3: mod_base = OTHER; note = 2'-O-methyladenosine
  modified_base 4: mod_base = gm
  modified_base 5: mod_base = OTHER; note = 2'-O-methyladenosine
  modified_base 6: mod_base = gm
  modified_base 7: mod_base = cm
  modified_base 8: mod_base = um
  modified_base 9: mod_base = OTHER; note = 2'-fluoroadenosine
  modified_base 10: mod_base = OTHER; note = 2'-fluorocytidine
  modified_base 11: mod_base = OTHER; note = 2'-fluoroadenosine
  modified_base 12: mod_base = gm
  modified_base 13: mod_base = cm
  modified_base 14: mod_base = um
  modified_base 15: mod_base = um
  modified_base 16: mod_base = cm
  modified_base 17: mod_base = OTHER; note = 2'-O-methyladenosine
  modified_base 18: mod_base = OTHER; note = 2'-O-methyladenosine
  modified_base 19: mod_base = cm
  modified_base 20: mod_base = OTHER; note = 2'-O-methylinosine
  modified_base 21: mod_base = OTHER; note = 2'-O-methyladenosine
  source 1..21: mol_type = other RNA
gcagagctacagcttcaacna

SEQ ID NO: 1376 - RNA, 21 nt, synthetic construct
  modified_base 1: mod_base = gm
  modified_base 2: mod_base = OTHER; note = 2 -O-methyl-2-aminoadenosine
  modified_base 3: mod_base = OTHER; note = 2'-O-methyladenosine
  modified_base 4: mod_base = gm
  modified_base 5: mod_base = um
  modified_base 6: mod_base = OTHER; note = 2'-O-methyladenosine
  modified_base 7: mod_base = um
  modified_base 8: mod_base = gm
  modified_base 9: mod_base = OTHER; note = 2'-fluorocytidine
  modified_base 10: mod_base = OTHER; note = 2'-fluorouridine
  modified_base 11: mod_base = OTHER; note = 2'-fluorocytidine
  modified_base 12: mod_base = OTHER; note = 2'-O-methyladenosine
  modified_base 13: mod_base = gm
  modified_base 14: mod_base = um
  modified_base 15: mod_base = OTHER; note = 2'-O-methyladenosine
  modified_base 16: mod_base = cm
  modified_base 17: mod_base = um
  modified_base 18: mod_base = gm
  modified_base 19: mod_base = OTHER; note = 2'-O-methylinosine
  modified_base 20: mod_base = um
  modified_base 21: mod_base = OTHER; note = 2'-O-methyladenosine
  source 1..21: mol_type = other RNA
gnagtatgctcagtactgnta

SEQ ID NO: 1377 - RNA, 21 nt, synthetic construct
  modified_base 1: mod_base = cm
  modified_base 1^2: mod_base = OTHER; note = phosphorothioate linkage
  modified_base 2: mod_base = um
  modified_base 3: mod_base = gm
  modified_base 4: mod_base = cm
  modified_base 5: mod_base = um
  modified_base 6: mod_base = OTHER; note = 2'-O-methyladenosine
  modified_base 7: mod_base = cm
  modified_base 8: mod_base = OTHER; note = 2'-O-methyladenosine
  modified_base 9: mod_base = OTHER; note = 2'-fluoroadenosine
  modified_base 10: mod_base = OTHER; note = 2'-fluorocytidine
  modified_base 11: mod_base = OTHER; note = 2'-fluorouridine
  modified_base 12: mod_base = OTHER; note = 2'-O-methyladenosine
  modified_base 13: mod_base = um
  modified_base 14: mod_base = gm
  modified_base 15: mod_base = OTHER; note = 2'-O-methyladenosine
  modified_base 16: mod_base = gm
  modified_base 17: mod_base = OTHER; note = 2'-O-methyladenosine
  modified_base 18: mod_base = um
  modified_base 19: mod_base = cm
  modified_base 20: mod_base = cm
  modified_base 21: mod_base = OTHER; note = 2'-O-methyladenosine
  source 1..21: mol_type = other RNA
ctgctacaactatgagatcca

SEQ ID NO: 1378 - RNA, 21 nt, synthetic construct
  modified_base 1: mod_base = cm
  modified_base 1^2: mod_base = OTHER; note = phosphorothioate linkage
  modified_base 2: mod_base = um
  modified_base 3: mod_base = gm
  modified_base 4: mod_base = cm
  modified_base 5: mod_base = um
  modified_base 6: mod_base = OTHER; note = 2'-O-methyladenosine
  modified_base 7: mod_base = cm
  modified_base 8: mod_base = OTHER; note = 2'-O-methyladenosine
  modified_base 9: mod_base = OTHER; note = 2'-fluoroadenosine
  modified_base 10: mod_base = OTHER; note = 2'-fluorocytidine
  modified_base 11: mod_base = OTHER; note = 2'-fluorouridine
  modified_base 12: mod_base = OTHER; note = 2'-O-methyladenosine
  modified_base 13: mod_base = um
  modified_base 14: mod_base = gm
  modified_base 15: mod_base = OTHER; note = 2'-O-methyladenosine
  modified_base 16: mod_base = OTHER; note = 2'-O-methylinosine
  modified_base 17: mod_base = OTHER; note = 2'-O-methyladenosine
  modified_base 18: mod_base = um
  modified_base 19: mod_base = cm
  modified_base 20: mod_base = cm
  modified_base 21: mod_base = OTHER; note = 2'-O-methyladenosine
  source 1..21: mol_type = other RNA
ctgctacaactatganatcca

SEQ ID NO: 1379 - RNA, 21 nt, synthetic construct
  modified_base 1: mod_base = cm
  modified_base 1^2: mod_base = OTHER; note = phosphorothioate linkage
  modified_base 2: mod_base = cm
  modified_base 3: mod_base = um
  modified_base 4: mod_base = gm
  modified_base 5: mod_base = gm
  modified_base 6: mod_base = OTHER; note = 2'-O-methyladenosine
  modified_base 7: mod_base = cm
  modified_base 8: mod_base = cm
  modified_base 9: mod_base = OTHER; note = 2'-fluoroadenosine
  modified_base 10: mod_base = OTHER; note = 2'-fluoroadenosine
  modified_base 11: mod_base = OTHER; note = 2'-fluoroguanosine
  modified_base 12: mod_base = um
  modified_base 13: mod_base = gm
  modified_base 14: mod_base = gm
  modified_base 15: mod_base = um
  modified_base 16: mod_base = um
  modified_base 17: mod_base = um
  modified_base 18: mod_base = gm
  modified_base 19: mod_base = OTHER; note = 2'-O-methyladenosine
  modified_base 20: mod_base = cm
  modified_base 21: mod_base = OTHER; note = 2'-O-methyladenosine
  source 1..21: mol_type = other RNA
cctggaccaagtggtttgaca

SEQ ID NO: 1380 - RNA, 21 nt, synthetic construct
  modified_base 1: mod_base = cm
  modified_base 1^2: mod_base = OTHER; note = phosphorothioate linkage
  modified_base 2: mod_base = cm
  modified_base 3: mod_base = um
  modified_base 4: mod_base = gm
  modified_base 5: mod_base = gm
  modified_base 6: mod_base = OTHER; note = 2'-O-methyladenosine
  modified_base 7: mod_base = cm
  modified_base 8: mod_base = cm
  modified_base 9: mod_base = OTHER; note = 2'-fluoroadenosine
  modified_base 10: mod_base = OTHER; note = 2'-fluoroadenosine
  modified_base 11: mod_base = OTHER; note = 2'-fluoroguanosine
  modified_base 12: mod_base = um
  modified_base 13: mod_base = gm
  modified_base 14: mod_base = gm
  modified_base 15: mod_base = um
  modified_base 16: mod_base = um
  modified_base 17: mod_base = um
  modified_base 18: mod_base = OTHER; note = 2'-O-methylinosine
  modified_base 19: mod_base = OTHER; note = 2'-O-methyladenosine
  modified_base 20: mod_base = cm
  modified_base 21: mod_base = OTHER; note = 2'-O-methyladenosine
  source 1..21: mol_type = other RNA
cctggaccaagtggtttnaca

SEQ ID NO: 1381 - RNA, 21 nt, synthetic construct
  modified_base 1: mod_base = cm
  modified_base 1^2: mod_base = OTHER; note = phosphorothioate linkage
  modified_base 2: mod_base = gm
  modified_base 3: mod_base = OTHER; note = 2'-O-methyladenosine
  modified_base 4: mod_base = gm
  modified_base 5: mod_base = OTHER; note = 2'-O-methyladenosine
  modified_base 6: mod_base = um
  modified_base 7: mod_base = cm
  modified_base 8: mod_base = OTHER; note = 2'-O-methyladenosine
  modified_base 9: mod_base = OTHER; note = 2'-fluorouridine
  modified_base 10: mod_base = OTHER; note = 2'-fluorocytidine
  modified_base 11: mod_base = OTHER; note = 2'-fluorouridine
  modified_base 12: mod_base = um
  modified_base 13: mod_base = cm
  modified_base 14: mod_base = OTHER; note = 2'-O-methyladenosine
  modified_base 15: mod_base = OTHER; note = 2'-O-methyladenosine
  modified_base 16: mod_base = cm
  modified_base 17: mod_base = OTHER; note = 2'-O-methyladenosine
  modified_base 18: mod_base = OTHER; note = 2'-O-methyladenosine
  modified_base 19: mod_base = cm
  modified_base 20: mod_base = OTHER; note = 2'-O-methyladenosine
  modified_base 21: mod_base = OTHER; note = 2'-O-methyladenosine
  source 1..21: mol_type = other RNA
cgagatcatcttcaacaacaa

SEQ ID NO: 1382 - RNA, 21 nt, synthetic construct
  modified_base 1: mod_base = OTHER; note = 2'-O-methyladenosine
  modified_base 2: mod_base = gm
  modified_base 3: mod_base = cm
  modified_base 4: mod_base = OTHER; note = 2'-O-methyladenosine
  modified_base 5: mod_base = gm
  modified_base 6: mod_base = um
  modified_base 7: mod_base = gm
  modified_base 8: mod_base = cm
  modified_base 9: mod_base = OTHER; note = 2'-fluorocytidine
  modified_base 10: mod_base = OTHER; note = 2'-fluorouridine
  modified_base 11: mod_base = OTHER; note = 2'-fluorouridine
  modified_base 12: mod_base = cm
  modified_base 13: mod_base = OTHER; note = 2'-O-methyladenosine
  modified_base 14: mod_base = cm
  modified_base 15: mod_base = um
  modified_base 16: mod_base = gm
  modified_base 17: mod_base = um
  modified_base 18: mod_base = OTHER; note = 2'-O-methyladenosine
  modified_base 19: mod_base = cm
  modified_base 20: mod_base = um
  modified_base 21: mod_base = OTHER; note = 2'-O-methyladenosine
  source 1..21: mol_type = other RNA
agcagtgccttcactgtacta

SEQ ID NO: 1383 - RNA, 21 nt, synthetic construct
  modified_base 1: mod_base = gm
  modified_base 2: mod_base = OTHER; note = 2'-O-methyladenosine
  modified_base 3: mod_base = cm
  modified_base 4: mod_base = OTHER; note = 2'-O-methyladenosine
  modified_base 5: mod_base = um
  modified_base 6: mod_base = cm
  modified_base 7: mod_base = OTHER; note = 2'-O-methyladenosine
  modified_base 8: mod_base = gm
  modified_base 9: mod_base = OTHER; note = 2'-fluoroguanosine
  modified_base 10: mod_base = OTHER; note = 2'-fluoroadenosine
  modified_base 11: mod_base = OTHER; note = 2'-fluoroadenosine
  modified_base 12: mod_base = cm
  modified_base 13: mod_base = OTHER; note = 2'-O-methyladenosine
  modified_base 14: mod_base = gm
  modified_base 15: mod_base = cm
  modified_base 16: mod_base = um
  modified_base 17: mod_base = um
  modified_base 18: mod_base = cm
  modified_base 19: mod_base = OTHER; note = 2'-O-methylinosine
  modified_base 20: mod_base = OTHER; note = 2'-O-methyladenosine
  modified_base 21: mod_base = OTHER; note = 2'-O-methyladenosine
  source 1..21: mol_type = other RNA
gacatcaggaacagcttcnaa

SEQ ID NO: 1384 - RNA, 21 nt, synthetic construct
  modified_base 1: mod_base = gm
  modified_base 2: mod_base = gm
  modified_base 3: mod_base = cm
  modified_base 4: mod_base = um
  modified_base 5: mod_base = gm
  modified_base 6: mod_base = OTHER; note = 2'-O-methyladenosine
  modified_base 7: mod_base = um
  modified_base 8: mod_base = um
  modified_base 9: mod_base = OTHER; note = 2'-fluorouridine
  modified_base 10: mod_base = OTHER; note = 2'-fluoroguanosine
  modified_base 11: mod_base = OTHER; note = 2'-fluorocytidine
  modified_base 12: mod_base = cm
  modified_base 13: mod_base = um
  modified_base 14: mod_base = gm
  modified_base 15: mod_base = OTHER; note = 2'-O-methyladenosine
  modified_base 16: mod_base = OTHER; note = 2'-O-methyladenosine
  modified_base 17: mod_base = cm
  modified_base 18: mod_base = OTHER; note = 2'-O-methyladenosine
  modified_base 19: mod_base = OTHER; note = 2'-O-methyladenosine
  modified_base 20: mod_base = gm
  modified_base 21: mod_base = OTHER; note = 2'-O-methyladenosine
  source 1..21: mol_type = other RNA
ggctgatttgcctgaacaaga

SEQ ID NO: 1385 - RNA, 21 nt, synthetic construct
  modified_base 1: mod_base = cm
  modified_base 2: mod_base = cm
  modified_base 3: mod_base = OTHER; note = 2'-O-methyladenosine
  modified_base 4: mod_base = gm
  modified_base 5: mod_base = gm
  modified_base 6: mod_base = OTHER; note = 2'-O-methyladenosine
  modified_base 7: mod_base = cm
  modified_base 8: mod_base = OTHER; note = 2'-O-methyladenosine
  modified_base 9: mod_base = OTHER; note = 2'-fluoroadenosine
  modified_base 10: mod_base = OTHER; note = 2'-fluorocytidine
  modified_base 11: mod_base = OTHER; note = 2'-fluorocytidine
  modified_base 12: mod_base = OTHER; note = 2'-O-methyladenosine
  modified_base 13: mod_base = cm
  modified_base 14: mod_base = um
  modified_base 15: mod_base = um
  modified_base 16: mod_base = um
  modified_base 17: mod_base = OTHER; note = 2'-O-methylinosine
  modified_base 18: mod_base = gm
  modified_base 19: mod_base = um
  modified_base 20: mod_base = gm
  modified_base 21: mod_base = OTHER; note = 2'-O-methyladenosine
  source 1..21: mol_type = other RNA
ccaggacaaccactttngtga

SEQ ID NO: 1386 - RNA, 21 nt, synthetic construct
  modified_base 1: mod_base = cm
  modified_base 2: mod_base = OTHER; note = 2'-O-methyladenosine
  modified_base 3: mod_base = OTHER; note = 2'-O-methyladenosine
  modified_base 4: mod_base = cm
  modified_base 5: mod_base = cm
  modified_base 6: mod_base = OTHER; note = 2'-O-methyladenosine
  modified_base 7: mod_base = gm
  modified_base 8: mod_base = OTHER; note = 2'-O-methyladenosine
  modified_base 9: mod_base = OTHER; note = 2'-fluoroadenosine
  modified_base 10: mod_base = OTHER; note = 2'-fluorocytidine
  modified_base 11: mod_base = OTHER; note = 2'-fluoroadenosine
  modified_base 12: mod_base = OTHER; note = 2'-O-methyladenosine
  modified_base 13: mod_base = cm
  modified_base 14: mod_base = cm
  modified_base 15: mod_base = um
  modified_base 16: mod_base = cm
  modified_base 17: mod_base = um
  modified_base 18: mod_base = OTHER; note = 2'-O-methylinosine
  modified_base 19: mod_base = cm
  modified_base 20: mod_base = um
  modified_base 21: mod_base = OTHER; note = 2'-O-methyladenosine
  source 1..21: mol_type = other RNA
caaccagaacaacctctncta

SEQ ID NO: 1387 - RNA, 21 nt, synthetic construct
  modified_base 1: mod_base = cm
  modified_base 2: mod_base = gm
  modified_base 3: mod_base = cm
  modified_base 4: mod_base = um
  modified_base 5: mod_base = OTHER; note = 2'-O-methyladenosine
  modified_base 6: mod_base = cm
  modified_base 7: mod_base = OTHER; note = 2'-O-methyladenosine
  modified_base 8: mod_base = OTHER; note = 2'-O-methyladenosine
  modified_base 9: mod_base = OTHER; note = 2'-fluorocytidine
  modified_base 10: mod_base = OTHER; note = 2'-fluorocytidine
  modified_base 11: mod_base = OTHER; note = 2'-fluoroadenosine
  modified_base 12: mod_base = gm
  modified_base 13: mod_base = cm
  modified_base 14: mod_base = OTHER; note = 2'-O-methyladenosine
  modified_base 15: mod_base = cm
  modified_base 16: mod_base = OTHER; note = 2'-O-methyladenosine
  modified_base 17: mod_base = OTHER; note = 2'-O-methyladenosine
  modified_base 18: mod_base = um
  modified_base 19: mod_base = cm
  modified_base 20: mod_base = um
  modified_base 21: mod_base = OTHER; note = 2'-O-methyladenosine
  source 1..21: mol_type = other RNA
cgctacaaccagcacaatcta

SEQ ID NO: 1388 - RNA, 21 nt, synthetic construct
  modified_base 1: mod_base = cm
  modified_base 2: mod_base = cm
  modified_base 3: mod_base = OTHER; note = 2'-O-methyladenosine
  modified_base 4: mod_base = cm
  modified_base 5: mod_base = OTHER; note = 2'-O-methyladenosine
  modified_base 6: mod_base = OTHER; note = 2'-O-methyladenosine
  modified_base 7: mod_base = cm
  modified_base 8: mod_base = cm
  modified_base 9: mod_base = OTHER; note = 2'-fluoroadenosine
  modified_base 10: mod_base = OTHER; note = 2'-fluoroguanosine
  modified_base 11: mod_base = OTHER; note = 2'-fluorocytidine
  modified_base 12: mod_base = OTHER; note = 2'-O-methyladenosine
  modified_base 13: mod_base = cm
  modified_base 14: mod_base = OTHER; note = 2'-O-methyladenosine
  modified_base 15: mod_base = OTHER; note = 2'-O-methyladenosine
  modified_base 16: mod_base = cm
  modified_base 17: mod_base = um
  modified_base 18: mod_base = um
  modified_base 19: mod_base = cm
  modified_base 20: mod_base = um
  modified_base 21: mod_base = OTHER; note = 2'-O-methyladenosine
  source 1..21: mol_type = other RNA
ccacaaccagcacaacttcta

SEQ ID NO: 1389 - RNA, 21 nt, synthetic construct
  modified_base 1: mod_base = gm
  modified_base 2: mod_base = OTHER; note = 2'-O-methyladenosine
  modified_base 3: mod_base = cm
  modified_base 4: mod_base = OTHER; note = 2'-O-methyladenosine
  modified_base 5: mod_base = OTHER; note = 2'-O-methyladenosine
  modified_base 6: mod_base = cm
  modified_base 7: mod_base = cm
  modified_base 8: mod_base = OTHER; note = 2'-O-methyladenosine
  modified_base 9: mod_base = OTHER; note = 2'-fluorocytidine
  modified_base 10: mod_base = OTHER; note = 2'-fluorouridine
  modified_base 11: mod_base = OTHER; note = 2'-fluorouridine
  modified_base 12: mod_base = um
  modified_base 13: mod_base = gm
  modified_base 14: mod_base = gm
  modified_base 15: mod_base = um
  modified_base 16: mod_base = gm
  modified_base 17: mod_base = OTHER; note = 2'-O-methyladenosine
  modified_base 18: mod_base = cm
  modified_base 19: mod_base = OTHER; note = 2'-O-methyladenosine
  modified_base 20: mod_base = OTHER; note = 2'-O-methyladenosine
  modified_base 21: mod_base = OTHER; note = 2'-O-methyladenosine
  source 1..21: mol_type = other RNA
gacaaccactttggtgacaaa

SEQ ID NO: 1390 - RNA, 21 nt, synthetic construct
  modified_base 1: mod_base = cm
  modified_base 2: mod_base = um
  modified_base 3: mod_base = OTHER; note = 2'-O-methyladenosine
  modified_base 4: mod_base = cm
  modified_base 5: mod_base = OTHER; note = 2'-O-methyladenosine
  modified_base 6: mod_base = OTHER; note = 2'-O-methyladenosine
  modified_base 7: mod_base = cm
  modified_base 8: mod_base = cm
  modified_base 9: mod_base = OTHER; note = 2'-fluoroadenosine
  modified_base 10: mod_base = OTHER; note = 2'-fluoroadenosine
  modified_base 11: mod_base = OTHER; note = 2'-fluorocytidine
  modified_base 12: mod_base = OTHER; note = 2'-O-methyladenosine
  modified_base 13: mod_base = cm
  modified_base 14: mod_base = OTHER; note = 2'-O-methyladenosine
  modified_base 15: mod_base = OTHER; note = 2'-O-methyladenosine
  modified_base 16: mod_base = cm
  modified_base 17: mod_base = um
  modified_base 18: mod_base = um
  modified_base 19: mod_base = cm
  modified_base 20: mod_base = um
  modified_base 21: mod_base = OTHER; note = 2'-O-methyladenosine
  source 1..21: mol_type = other RNA
ctacaaccaacacaacttcta

SEQ ID NO: 1391 - RNA, 21 nt, synthetic construct
  modified_base 1: mod_base = OTHER; note = 2'-O-methyladenosine
  modified_base 2: mod_base = cm
  modified_base 3: mod_base = cm
  modified_base 4: mod_base = um
  modified_base 5: mod_base = cm
  modified_base 6: mod_base = um
  modified_base 7: mod_base = gm
  modified_base 8: mod_base = cm
  modified_base 9: mod_base = OTHER; note = 2'-fluorouridine
  modified_base 10: mod_base = OTHER; note = 2'-fluorocytidine
  modified_base 11: mod_base = OTHER; note = 2'-fluorocytidine
  modified_base 12: mod_base = um
  modified_base 13: mod_base = OTHER; note = 2'-O-methyladenosine
  modified_base 14: mod_base = cm
  modified_base 15: mod_base = OTHER; note = 2'-O-methyladenosine
  modified_base 16: mod_base = OTHER; note = 2'-O-methyladenosine
  modified_base 17: mod_base = cm
  modified_base 18: mod_base = um
  modified_base 19: mod_base = OTHER; note = 2'-O-methyladenosine
  modified_base 20: mod_base = gm
  modified_base 21: mod_base = OTHER; note = 2'-O-methyladenosine
  source 1..21: mol_type = other RNA
acctctgctcctacaactaga

SEQ ID NO: 1392 - RNA, 21 nt, synthetic construct
  modified_base 1: mod_base = gm
  modified_base 1^2: mod_base = OTHER; note = phosphorothioate linkage
  modified_base 2: mod_base = cm
  modified_base 3: mod_base = um
  modified_base 4: mod_base = gm
  modified_base 5: mod_base = um
  modified_base 6: mod_base = um
  modified_base 7: mod_base = cm
  modified_base 8: mod_base = um
  modified_base 9: mod_base = OTHER; note = 2'-fluoroguanosine
  modified_base 10: mod_base = OTHER; note = 2'-fluorocytidine
  modified_base 11: mod_base = OTHER; note = 2'-fluoroguanosine
  modified_base 12: mod_base = OTHER; note = 2'-O-methyladenosine
  modified_base 13: mod_base = cm
  modified_base 14: mod_base = um
  modified_base 15: mod_base = OTHER; note = 2'-O-methyladenosine
  modified_base 16: mod_base = cm
  modified_base 17: mod_base = um
  modified_base 18: mod_base = OTHER; note = 2'-O-methyladenosine
  modified_base 19: mod_base = cm
  modified_base 20: mod_base = OTHER; note = 2'-O-methyladenosine
  modified_base 21: mod_base = OTHER; note = 2'-O-methyladenosine
  source 1..21: mol_type = other RNA
gctgttctgcgactactacaa

SEQ ID NO: 1393 - RNA, 21 nt, synthetic construct
  modified_base 1: mod_base = gm
  modified_base 1^2: mod_base = OTHER; note = phosphorothioate linkage
  modified_base 2: mod_base = cm
  modified_base 3: mod_base = um
  modified_base 4: mod_base = gm
  modified_base 5: mod_base = um
  modified_base 6: mod_base = um
  modified_base 7: mod_base = cm
  modified_base 8: mod_base = um
  modified_base 9: mod_base = OTHER; note = 2'-fluoroguanosine
  modified_base 10: mod_base = OTHER; note = 2'-fluorouridine
  modified_base 11: mod_base = OTHER; note = 2'-fluoroguanosine
  modified_base 12: mod_base = OTHER; note = 2'-O-methyladenosine
  modified_base 13: mod_base = cm
  modified_base 14: mod_base = um
  modified_base 15: mod_base = OTHER; note = 2'-O-methyladenosine
  modified_base 16: mod_base = cm
  modified_base 17: mod_base = um
  modified_base 18: mod_base = OTHER; note = 2'-O-methyladenosine
  modified_base 19: mod_base = cm
  modified_base 20: mod_base = OTHER; note = 2'-O-methyladenosine
  modified_base 21: mod_base = OTHER; note = 2'-O-methyladenosine
  source 1..21: mol_type = other RNA
gctgttctgtgactactacaa

SEQ ID NO: 1394 - RNA, 21 nt, synthetic construct
  modified_base 1: mod_base = OTHER; note = 2'-O-methyladenosine
  modified_base 1^2: mod_base = OTHER; note = phosphorothioate linkage
  modified_base 2: mod_base = cm
  modified_base 3: mod_base = cm
  modified_base 4: mod_base = OTHER; note = 2'-O-methyladenosine
  modified_base 5: mod_base = gm
  modified_base 6: mod_base = OTHER; note = 2'-O-methyladenosine
  modified_base 7: mod_base = um
  modified_base 8: mod_base = cm
  modified_base 9: mod_base = OTHER; note = 2'-fluoroadenosine
  modified_base 10: mod_base = OTHER; note = 2'-fluorouridine
  modified_base 11: mod_base = OTHER; note = 2'-fluorocytidine
  modified_base 12: mod_base = um
  modified_base 13: mod_base = um
  modified_base 14: mod_base = cm
  modified_base 15: mod_base = OTHER; note = 2'-O-methyladenosine
  modified_base 16: mod_base = OTHER; note = 2'-O-methyladenosine
  modified_base 17: mod_base = cm
  modified_base 18: mod_base = OTHER; note = 2'-O-methyladenosine
  modified_base 19: mod_base = OTHER; note = 2'-O-methyladenosine
  modified_base 20: mod_base = cm
  modified_base 21: mod_base = OTHER; note = 2'-O-methyladenosine
  source 1..21: mol_type = other RNA
accagatcatcttcaacaaca

SEQ ID NO: 1395 - RNA, 21 nt, synthetic construct
  modified_base 1: mod_base = gm
  modified_base 1^2: mod_base = OTHER; note = phosphorothioate linkage
  modified_base 2: mod_base = gm
  modified_base 3: mod_base = cm
  modified_base 4: mod_base = um
  modified_base 5: mod_base = cm
  modified_base 6: mod_base = um
  modified_base 7: mod_base = gm
  modified_base 8: mod_base = um
  modified_base 9: mod_base = OTHER; note = 2'-fluoroguanosine
  modified_base 10: mod_base = OTHER; note = 2'-fluoroguanosine
  modified_base 11: mod_base = OTHER; note = 2'-fluorouridine
  modified_base 12: mod_base = OTHER; note = 2'-O-methyladenosine
  modified_base 13: mod_base = OTHER; note = 2'-O-methyladenosine
  modified_base 14: mod_base = cm
  modified_base 15: mod_base = um
  modified_base 16: mod_base = um
  modified_base 17: mod_base = cm
  modified_base 18: mod_base = OTHER; note = 2'-O-methyladenosine
  modified_base 19: mod_base = OTHER; note = 2'-O-methyladenosine
  modified_base 20: mod_base = cm
  modified_base 21: mod_base = OTHER; note = 2'-O-methyladenosine
  source 1..21: mol_type = other RNA
ggctctgtggtaacttcaaca

SEQ ID NO: 1396 - RNA, 21 nt, synthetic construct
  modified_base 1: mod_base = gm
  modified_base 1^2: mod_base = OTHER; note = phosphorothioate linkage
  modified_base 2: mod_base = OTHER; note = 2'-O-methyladenosine
  modified_base 3: mod_base = gm
  modified_base 4: mod_base = cm
  modified_base 5: mod_base = gm
  modified_base 6: mod_base = um
  modified_base 7: mod_base = gm
  modified_base 8: mod_base = gm
  modified_base 9: mod_base = OTHER; note = 2'-fluoroadenosine
  modified_base 10: mod_base = OTHER; note = 2'-fluoroguanosine
  modified_base 11: mod_base = OTHER; note = 2'-fluoroadenosine
  modified_base 12: mod_base = OTHER; note = 2'-O-methyladenosine
  modified_base 13: mod_base = um
  modified_base 14: mod_base = gm
  modified_base 15: mod_base = OTHER; note = 2'-O-methyladenosine
  modified_base 16: mod_base = OTHER; note = 2'-O-methyladenosine
  modified_base 17: mod_base = OTHER; note = 2'-O-methyladenosine
  modified_base 18: mod_base = OTHER; note = 2'-O-methyladenosine
  modified_base 19: mod_base = gm
  modified_base 20: mod_base = um
  modified_base 21: mod_base = OTHER; note = 2'-O-methyladenosine
  source 1..21: mol_type = other RNA
gagcgtggagaatgaaaagta

SEQ ID NO: 1397 - RNA, 21 nt, synthetic construct
  modified_base 1: mod_base = gm
  modified_base 1^2: mod_base = OTHER; note = phosphorothioate linkage
  modified_base 2: mod_base = gm
  modified_base 3: mod_base = gm
  modified_base 4: mod_base = OTHER; note = 2'-O-methyladenosine
  modified_base 5: mod_base = gm
  modified_base 6: mod_base = OTHER; note = 2'-O-methyladenosine
  modified_base 7: mod_base = OTHER; note = 2'-O-methyladenosine
  modified_base 8: mod_base = um
  modified_base 9: mod_base = OTHER; note = 2'-fluoroguanosine
  modified_base 10: mod_base = OTHER; note = 2'-fluoroadenosine
  modified_base 11: mod_base = OTHER; note = 2'-fluoroadenosine
  modified_base 12: mod_base = OTHER; note = 2'-O-methyladenosine
  modified_base 13: mod_base = OTHER; note = 2'-O-methyladenosine
  modified_base 14: mod_base = gm
  modified_base 15: mod_base = um
  modified_base 16: mod_base = OTHER; note = 2'-O-methyladenosine
  modified_base 17: mod_base = um
  modified_base 18: mod_base = gm
  modified_base 19: mod_base = cm
  modified_base 20: mod_base = um
  modified_base 21: mod_base = OTHER; note = 2'-O-methyladenosine
  source 1..21: mol_type = other RNA
gggagaatgaaaagtatgcta

SEQ ID NO: 1398 - RNA, 21 nt, synthetic construct
  modified_base 1: mod_base = cm
  modified_base 1^2: mod_base = OTHER; note = phosphorothioate linkage
  modified_base 2: mod_base = um
  modified_base 3: mod_base = um
  modified_base 4: mod_base = cm
  modified_base 5: mod_base = um
  modified_base 6: mod_base = cm
  modified_base 7: mod_base = gm
  modified_base 8: mod_base = OTHER; note = 2'-O-methyladenosine
  modified_base 9: mod_base = OTHER; note = 2'-fluoroadenosine
  modified_base 10: mod_base = OTHER; note = 2'-fluorocytidine
  modified_base 11: mod_base = OTHER; note = 2'-fluorouridine
  modified_base 12: mod_base = gm
  modified_base 13: mod_base = cm
  modified_base 14: mod_base = OTHER; note = 2'-O-methyladenosine
  modified_base 15: mod_base = um
  modified_base 16: mod_base = gm
  modified_base 17: mod_base = um
  modified_base 18: mod_base = OTHER; note = 2'-O-methyladenosine
  modified_base 19: mod_base = um
  modified_base 20: mod_base = gm
  modified_base 21: mod_base = OTHER; note = 2'-O-methyladenosine
  source 1..21: mol_type = other RNA
cttctcgaactgcatgtatga

SEQ ID NO: 1399 - RNA, 21 nt, synthetic construct
  modified_base 1: mod_base = gm
  modified_base 1^2: mod_base = OTHER; note = phosphorothioate linkage
  modified_base 2: mod_base = cm
  modified_base 3: mod_base = um
  modified_base 4: mod_base = cm
  modified_base 5: mod_base = gm
  modified_base 6: mod_base = OTHER; note = 2'-O-methyladenosine
  modified_base 7: mod_base = OTHER; note = 2'-O-methyladenosine
  modified_base 8: mod_base = cm
  modified_base 9: mod_base = OTHER; note = 2'-fluorouridine
  modified_base 10: mod_base = OTHER; note = 2'-fluoroguanosine
  modified_base 11: mod_base = OTHER; note = 2'-fluorocytidine
  modified_base 12: mod_base = OTHER; note = 2'-O-methyladenosine
  modified_base 13: mod_base = um
  modified_base 14: mod_base = gm
  modified_base 15: mod_base = um
  modified_base 16: mod_base = OTHER; note = 2'-O-methyladenosine
  modified_base 17: mod_base = um
  modified_base 18: mod_base = gm
  modified_base 19: mod_base = OTHER; note = 2'-O-methyladenosine
  modified_base 20: mod_base = cm
  modified_base 21: mod_base = OTHER; note = 2'-O-methyladenosine
  source 1..21: mol_type = other RNA
gctcgaactgcatgtatgaca

SEQ ID NO: 1400 - RNA, 21 nt, synthetic construct
  modified_base 1: mod_base = cm
  modified_base 1^2: mod_base = OTHER; note = phosphorothioate linkage
  modified_base 2: mod_base = um
  modified_base 3: mod_base = cm
  modified_base 4: mod_base = gm
  modified_base 5: mod_base = OTHER; note = 2'-O-methyladenosine
  modified_base 6: mod_base = OTHER; note = 2'-O-methyladenosine
  modified_base 7: mod_base = cm
  modified_base 8: mod_base = um
  modified_base 9: mod_base = OTHER; note = 2'-fluoroguanosine
  modified_base 10: mod_base = OTHER; note = 2'-fluorocytidine
  modified_base 11: mod_base = OTHER; note = 2'-fluoroadenosine
  modified_base 12: mod_base = um
  modified_base 13: mod_base = gm
  modified_base 14: mod_base = um
  modified_base 15: mod_base = OTHER; note = 2'-O-methyladenosine
  modified_base 16: mod_base = um
  modified_base 17: mod_base = gm
  modified_base 18: mod_base = OTHER; note = 2'-O-methyladenosine
  modified_base 19: mod_base = cm
  modified_base 20: mod_base = OTHER; note = 2'-O-methyladenosine
  modified_base 21: mod_base = OTHER; note = 2'-O-methyladenosine
  source 1..21: mol_type = other RNA
ctcgaactgcatgtatgacaa

SEQ ID NO: 1401 - RNA, 21 nt, synthetic construct
  modified_base 1: mod_base = cm
  modified_base 1^2: mod_base = OTHER; note = phosphorothioate linkage
  modified_base 2: mod_base = cm
  modified_base 3: mod_base = OTHER; note = 2'-O-methyladenosine
  modified_base 4: mod_base = cm
  modified_base 5: mod_base = um
  modified_base 6: mod_base = gm
  modified_base 7: mod_base = um
  modified_base 8: mod_base = um
  modified_base 9: mod_base = OTHER; note = 2'-fluorocytidine
  modified_base 10: mod_base = OTHER; note = 2'-fluorouridine
  modified_base 11: mod_base = OTHER; note = 2'-fluoroguanosine
  modified_base 12: mod_base = um
  modified_base 13: mod_base = gm
  modified_base 14: mod_base = OTHER; note = 2'-O-methyladenosine
  modified_base 15: mod_base = cm
  modified_base 16: mod_base = um
  modified_base 17: mod_base = OTHER; note = 2'-O-methyladenosine
  modified_base 18: mod_base = cm
  modified_base 19: mod_base = um
  modified_base 20: mod_base = OTHER; note = 2'-O-methyladenosine
  modified_base 21: mod_base = OTHER; note = 2'-O-methyladenosine
  source 1..21: mol_type = other RNA
ccactgttctgtgactactaa

SEQ ID NO: 1402 - RNA, 21 nt, synthetic construct
  modified_base 1: mod_base = cm
  modified_base 1^2: mod_base = OTHER; note = phosphorothioate linkage
  modified_base 2: mod_base = OTHER; note = 2'-O-methyladenosine
  modified_base 3: mod_base = cm
  modified_base 4: mod_base = um
  modified_base 5: mod_base = gm
  modified_base 6: mod_base = um
  modified_base 7: mod_base = um
  modified_base 8: mod_base = cm
  modified_base 9: mod_base = OTHER; note = 2'-fluorouridine
  modified_base 10: mod_base = OTHER; note = 2'-fluoroguanosine
  modified_base 11: mod_base = OTHER; note = 2'-fluorouridine
  modified_base 12: mod_base = gm
  modified_base 13: mod_base = OTHER; note = 2'-O-methyladenosine
  modified_base 14: mod_base = cm
  modified_base 15: mod_base = um
  modified_base 16: mod_base = OTHER; note = 2'-O-methyladenosine
  modified_base 17: mod_base = cm
  modified_base 18: mod_base = um
  modified_base 19: mod_base = OTHER; note = 2'-O-methyladenosine
  modified_base 20: mod_base = cm
  modified_base 21: mod_base = OTHER; note = 2'-O-methyladenosine
  source 1..21: mol_type = other RNA
cactgttctgtgactactaca

SEQ ID NO: 1403 - RNA, 21 nt, synthetic construct
  modified_base 1: mod_base = cm
  modified_base 1^2: mod_base = OTHER; note = phosphorothioate linkage
  modified_base 2: mod_base = cm
  modified_base 3: mod_base = um
  modified_base 4: mod_base = um
  modified_base 5: mod_base = cm
  modified_base 6: mod_base = um
  modified_base 7: mod_base = um
  modified_base 8: mod_base = cm
  modified_base 9: mod_base = OTHER; note = 2'-fluorouridine
  modified_base 10: mod_base = OTHER; note = 2'-fluorocytidine
  modified_base 11: mod_base = OTHER; note = 2'-fluoroguanosine
  modified_base 12: mod_base = OTHER; note = 2'-O-methyladenosine
  modified_base 13: mod_base = OTHER; note = 2'-O-methyladenosine
  modified_base 14: mod_base = cm
  modified_base 15: mod_base = um
  modified_base 16: mod_base = OTHER; note = 2'-O-methylinosine
  modified_base 17: mod_base = cm
  modified_base 18: mod_base = OTHER; note = 2'-O-methyladenosine
  modified_base 19: mod_base = um
  modified_base 20: mod_base = gm
  modified_base 21: mod_base = um
  source 1..21: mol_type = other RNA
ccttcttctcgaactncatgt

SEQ ID NO: 1404 - RNA, 21 nt, synthetic construct
  modified_base 1: mod_base = cm
  modified_base 1^2: mod_base = OTHER; note = phosphorothioate linkage
  modified_base 2: mod_base = cm
  modified_base 3: mod_base = OTHER; note = 2'-O-methyladenosine
  modified_base 4: mod_base = cm
  modified_base 5: mod_base = cm
  modified_base 6: mod_base = cm
  modified_base 7: mod_base = OTHER; note = 2'-O-methyladenosine
  modified_base 8: mod_base = um
  modified_base 9: mod_base = OTHER; note = 2'-fluoroguanosine
  modified_base 10: mod_base = OTHER; note = 2'-fluorouridine
  modified_base 11: mod_base = OTHER; note = 2'-fluoroguanosine
  modified_base 12: mod_base = cm
  modified_base 13: mod_base = um
  modified_base 14: mod_base = OTHER; note = 2'-O-methyladenosine
  modified_base 15: mod_base = cm
  modified_base 16: mod_base = OTHER; note = 2'-O-methyladenosine
  modified_base 17: mod_base = OTHER; note = 2'-O-methyladenosine
  modified_base 18: mod_base = cm
  modified_base 19: mod_base = um
  modified_base 20: mod_base = OTHER; note = 2'-O-methyladenosine
  modified_base 21: mod_base = um
  source 1..21: mol_type = other RNA
ccacccatgtgctacaactat

SEQ ID NO: 1405 - RNA, 21 nt, synthetic construct
  modified_base 1: mod_base = cm
  modified_base 1^2: mod_base = OTHER; note = phosphorothioate linkage
  modified_base 2: mod_base = um
  modified_base 3: mod_base = gm
  modified_base 4: mod_base = cm
  modified_base 5: mod_base = um
  modified_base 6: mod_base = OTHER; note = 2'-O-methyladenosine
  modified_base 7: mod_base = OTHER; note = 2'-fluorocytidine
  modified_base 8: mod_base = OTHER; note = 2'-O-methyladenosine
  modified_base 9: mod_base = OTHER; note = 2'-fluoroadenosine
  modified_base 10: mod_base = cm
  modified_base 11: mod_base = OTHER; note = 2'-fluorouridine
  modified_base 12: mod_base = OTHER; note = 2'-O-methyladenosine
  modified_base 13: mod_base = um
  modified_base 14: mod_base = gm
  modified_base 15: mod_base = OTHER; note = 2'-O-methyladenosine
  modified_base 16: mod_base = OTHER; note = 2'-O-methylinosine
  modified_base 17: mod_base = OTHER; note = 2'-O-methyladenosine
  modified_base 18: mod_base = um
  modified_base 19: mod_base = cm
  modified_base 20: mod_base = cm
  modified_base 21: mod_base = OTHER; note = 2'-O-methyladenosine
  source 1..21: mol_type = other RNA
ctgctacaactatganatcca

SEQ ID NO: 1406 - RNA, 21 nt, synthetic construct
  modified_base 1: mod_base = cm
  modified_base 1^2: mod_base = OTHER; note = phosphorothioate linkage
  modified_base 2: mod_base = gm
  modified_base 3: mod_base = OTHER; note = 2'-O-methyladenosine
  modified_base 4: mod_base = gm
  modified_base 5: mod_base = OTHER; note = 2'-O-methyladenosine
  modified_base 6: mod_base = um
  modified_base 7: mod_base = OTHER; note = 2'-fluorocytidine
  modified_base 8: mod_base = OTHER; note = 2'-O-methyladenosine
  modified_base 9: mod_base = OTHER; note = 2'-fluorouridine
  modified_base 10: mod_base = cm
  modified_base 11: mod_base = OTHER; note = 2'-fluorouridine
  modified_base 12: mod_base = um
  modified_base 13: mod_base = cm
  modified_base 14: mod_base = OTHER; note = 2'-O-methyladenosine
  modified_base 15: mod_base = OTHER; note = 2'-O-methyladenosine
  modified_base 16: mod_base = cm
  modified_base 17: mod_base = OTHER; note = 2'-O-methyladenosine
  modified_base 18: mod_base = OTHER; note = 2'-O-methyladenosine
  modified_base 19: mod_base = cm
  modified_base 20: mod_base = OTHER; note = 2'-O-methyladenosine
  modified_base 21: mod_base = OTHER; note = 2'-O-methyladenosine
  source 1..21: mol_type = other RNA
cgagatcatcttcaacaacaa

SEQ ID NO: 1407 - RNA, 21 nt, synthetic construct
  modified_base 1: mod_base = cm
  modified_base 1^2: mod_base = OTHER; note = phosphorothioate linkage
  modified_base 2: mod_base = OTHER; note = 2'-O-methyladenosine
  modified_base 3: mod_base = cm
  modified_base 4: mod_base = um
  modified_base 5: mod_base = gm
  modified_base 6: mod_base = um
  modified_base 7: mod_base = OTHER; note = 2'-fluorouridine
  modified_base 8: mod_base = cm
  modified_base 9: mod_base = OTHER; note = 2'-fluorouridine
  modified_base 10: mod_base = gm
  modified_base 11: mod_base = OTHER; note = 2'-fluorouridine
  modified_base 12: mod_base = gm
  modified_base 13: mod_base = OTHER; note = 2'-O-methyladenosine
  modified_base 14: mod_base = cm
  modified_base 15: mod_base = um
  modified_base 16: mod_base = OTHER; note = 2'-O-methyladenosine
  modified_base 17: mod_base = cm
  modified_base 18: mod_base = um
  modified_base 19: mod_base = OTHER; note = 2'-O-methyladenosine
  modified_base 20: mod_base = cm
  modified_base 21: mod_base = OTHER; note = 2'-O-methyladenosine
  source 1..21: mol_type = other RNA
cactgttctgtgactactaca

SEQ ID NO: 1408 - RNA, 21 nt, synthetic construct
  modified_base 1: mod_base = gm
  modified_base 1^2: mod_base = OTHER; note = phosphorothioate linkage
  modified_base 2: mod_base = OTHER; note = 2'-O-methyladenosine
  modified_base 3: mod_base = cm
  modified_base 4: mod_base = um
  modified_base 5: mod_base = gm
  modified_base 6: mod_base = um
  modified_base 7: mod_base = OTHER; note = 2'-fluorouridine
  modified_base 8: mod_base = cm
  modified_base 9: mod_base = OTHER; note = 2'-fluorouridine
  modified_base 10: mod_base = gm
  modified_base 11: mod_base = OTHER; note = 2'-fluorouridine
  modified_base 12: mod_base = gm
  modified_base 13: mod_base = OTHER; note = 2'-O-methyladenosine
  modified_base 14: mod_base = cm
  modified_base 15: mod_base = um
  modified_base 16: mod_base = OTHER; note = 2'-O-methyladenosine
  modified_base 17: mod_base = cm
  modified_base 18: mod_base = um
  modified_base 19: mod_base = OTHER; note = 2'-O-methyladenosine
  modified_base 20: mod_base = cm
  modified_base 21: mod_base = OTHER; note = 2'-O-methyladenosine
  source 1..21: mol_type = other RNA
gactgttctgtgactactaca

SEQ ID NO: 1409 - RNA, 21 nt, synthetic construct
  modified_base 1: mod_base = um
  modified_base 2: mod_base = gm
  modified_base 3: mod_base = gm
  modified_base 4: mod_base = gm
  modified_base 5: mod_base = gm
  modified_base 6: mod_base = OTHER; note = 2'-O-methyladenosine
  modified_base 7: mod_base = OTHER; note = 2'-O-methyladenosine
  modified_base 8: mod_base = gm
  modified_base 9: mod_base = OTHER; note = 2'-fluorouridine
  modified_base 10: mod_base = OTHER; note = 2'-fluoroguanosine
  modified_base 11: mod_base = OTHER; note = 2'-fluorouridine
  modified_base 12: mod_base = um
  modified_base 13: mod_base = cm
  modified_base 14: mod_base = cm
  modified_base 15: mod_base = um
  modified_base 16: mod_base = OTHER; note = 2'-O-methylinosine
  modified_base 17: mod_base = OTHER; note = 2'-O-methyladenosine
  modified_base 18: mod_base = OTHER; note = 2'-O-methyladenosine
  modified_base 19: mod_base = cm
  modified_base 20: mod_base = cm
  modified_base 21: mod_base = OTHER; note = 2'-O-methyladenosine
  source 1..21: mol_type = other RNA
tggggaagtgttcctnaacca

SEQ ID NO: 1410 - RNA, 21 nt, synthetic construct
  modified_base 1: mod_base = gm
  modified_base 2: mod_base = gm
  modified_base 3: mod_base = OTHER; note = 2'-O-methyladenosine
  modified_base 4: mod_base = cm
  modified_base 5: mod_base = OTHER; note = 2'-O-methyladenosine
  modified_base 6: mod_base = um
  modified_base 7: mod_base = cm
  modified_base 8: mod_base = OTHER; note = 2'-O-methyladenosine
  modified_base 9: mod_base = OTHER; note = 2'-fluorocytidine
  modified_base 10: mod_base = OTHER; note = 2'-fluorocytidine
  modified_base 11: mod_base = OTHER; note = 2'-fluorouridine
  modified_base 12: mod_base = gm
  modified_base 13: mod_base = cm
  modified_base 14: mod_base = OTHER; note = 2'-O-methyladenosine
  modified_base 15: mod_base = gm
  modified_base 16: mod_base = um
  modified_base 17: mod_base = OTHER; note = 2'-O-methylinosine
  modified_base 18: mod_base = um
  modified_base 19: mod_base = um
  modified_base 20: mod_base = gm
  modified_base 21: mod_base = OTHER; note = 2'-O-methyladenosine
  source 1..21: mol_type = other RNA
ggacatcacctgcagtnttga

SEQ ID NO: 1411 - RNA, 21 nt, synthetic construct
  modified_base 1: mod_base = um
  modified_base 2: mod_base = gm
  modified_base 3: mod_base = um
  modified_base 4: mod_base = gm
  modified_base 5: mod_base = gm
  modified_base 6: mod_base = gm
  modified_base 7: mod_base = OTHER; note = 2'-O-methyladenosine
  modified_base 8: mod_base = OTHER; note = 2'-O-methyladenosine
  modified_base 9: mod_base = OTHER; note = 2'-fluorocytidine
  modified_base 10: mod_base = OTHER; note = 2'-fluorouridine
  modified_base 11: mod_base = OTHER; note = 2'-fluorouridine
  modified_base 12: mod_base = cm
  modified_base 13: mod_base = gm
  modified_base 14: mod_base = OTHER; note = 2'-O-methyladenosine
  modified_base 15: mod_base = cm
  modified_base 16: mod_base = OTHER; note = 2'-O-methylinosine
  modified_base 17: mod_base = OTHER; note = 2'-O-methyladenosine
  modified_base 18: mod_base = cm
  modified_base 19: mod_base = OTHER; note = 2'-O-methyladenosine
  modified_base 20: mod_base = um
  modified_base 21: mod_base = OTHER; note = 2'-O-methyladenosine
  source 1..21: mol_type = other RNA
tgtgggaacttcgacnacata

SEQ ID NO: 1412 - RNA, 21 nt, synthetic construct
  modified_base 1: mod_base = gm
  modified_base 2: mod_base = um
  modified_base 3: mod_base = cm
  modified_base 4: mod_base = um
  modified_base 5: mod_base = um
  modified_base 6: mod_base = um
  modified_base 7: mod_base = gm
  modified_base 8: mod_base = OTHER; note = 2'-O-methyladenosine
  modified_base 9: mod_base = OTHER; note = 2'-fluorouridine
  modified_base 10: mod_base = OTHER; note = 2'-fluoroguanosine
  modified_base 11: mod_base = OTHER; note = 2'-fluoroadenosine
  modified_base 12: mod_base = gm
  modified_base 13: mod_base = gm
  modified_base 14: mod_base = OTHER; note = 2'-O-methyladenosine
  modified_base 15: mod_base = cm
  modified_base 16: mod_base = OTHER; note = 2'-O-methyladenosine
  modified_base 17: mod_base = OTHER; note = 2'-O-methyladenosine
  modified_base 18: mod_base = gm
  modified_base 19: mod_base = OTHER; note = 2'-O-methyladenosine
  modified_base 20: mod_base = um
  modified_base 21: mod_base = OTHER; note = 2'-O-methyladenosine
  source 1..21: mol_type = other RNA
gtctttgatgaggacaagata

SEQ ID NO: 1413 - RNA, 21 nt, synthetic construct
  modified_base 1: mod_base = gm
  modified_base 2: mod_base = gm
  modified_base 3: mod_base = OTHER; note = 2'-O-methyladenosine
  modified_base 4: mod_base = cm
  modified_base 5: mod_base = gm
  modified_base 6: mod_base = um
  modified_base 7: mod_base = cm
  modified_base 8: mod_base = OTHER; note = 2'-O-methyladenosine
  modified_base 9: mod_base = OTHER; note = 2'-fluorouridine
  modified_base 10: mod_base = OTHER; note = 2'-fluorocytidine
  modified_base 11: mod_base = OTHER; note = 2'-fluorouridine
  modified_base 12: mod_base = OTHER; note = 2'-O-methyladenosine
  modified_base 13: mod_base = cm
  modified_base 14: mod_base = cm
  modified_base 15: mod_base = OTHER; note = 2'-O-methyladenosine
  modified_base 16: mod_base = cm
  modified_base 17: mod_base = OTHER; note = 2'-O-methyladenosine
  modified_base 18: mod_base = cm
  modified_base 19: mod_base = OTHER; note = 2'-O-methylinosine
  modified_base 20: mod_base = OTHER; note = 2'-O-methyladenosine
  modified_base 21: mod_base = OTHER; note = 2'-O-methyladenosine
  source 1..21: mol_type = other RNA
ggacgtcatctaccacacnaa

SEQ ID NO: 1414 - RNA, 21 nt, synthetic construct
  modified_base 1: mod_base = cm
  modified_base 2: mod_base = um
  modified_base 3: mod_base = gm
  modified_base 4: mod_base = cm
  modified_base 5: mod_base = um
  modified_base 6: mod_base = OTHER; note = 2'-O-methyladenosine
  modified_base 7: mod_base = cm
  modified_base 8: mod_base = OTHER; note = 2'-O-methyladenosine
  modified_base 9: mod_base = OTHER; note = 2'-fluoroadenosine
  modified_base 10: mod_base = OTHER; note = 2'-fluorocytidine
  modified_base 11: mod_base = OTHER; note = 2'-fluorouridine
  modified_base 12: mod_base = OTHER; note = 2'-O-methyladenosine
  modified_base 13: mod_base = um
  modified_base 14: mod_base = gm
  modified_base 15: mod_base = OTHER; note = 2'-O-methyladenosine
  modified_base 16: mod_base = OTHER; note = 2'-O-methylinosine
  modified_base 17: mod_base = OTHER; note = 2'-O-methyladenosine
  modified_base 18: mod_base = um
  modified_base 19: mod_base = cm
  modified_base 20: mod_base = cm
  modified_base 21: mod_base = OTHER; note = 2'-O-methyladenosine
  source 1..21: mol_type = other RNA
ctgctacaactatganatcca

SEQ ID NO: 1415 - RNA, 21 nt, synthetic construct
  modified_base 1: mod_base = gm
  modified_base 2: mod_base = cm
  modified_base 3: mod_base = OTHER; note = 2'-O-methyladenosine
  modified_base 4: mod_base = cm
  modified_base 5: mod_base = cm
  modified_base 6: mod_base = um
  modified_base 7: mod_base = cm
  modified_base 8: mod_base = cm
  modified_base 9: mod_base = OTHER; note = 2'-fluorouridine
  modified_base 10: mod_base = OTHER; note = 2'-fluorocytidine
  modified_base 11: mod_base = OTHER; note = 2'-fluorouridine
  modified_base 12: mod_base = um
  modified_base 13: mod_base = gm
  modified_base 14: mod_base = OTHER; note = 2'-O-methylinosine
  modified_base 15: mod_base = cm
  modified_base 16: mod_base = OTHER; note = 2'-O-methyladenosine
  modified_base 17: mod_base = gm
  modified_base 18: mod_base = OTHER; note = 2'-O-methyladenosine
  modified_base 19: mod_base = OTHER; note = 2'-O-methyladenosine
  modified_base 20: mod_base = OTHER; note = 2'-O-methyladenosine
  modified_base 21: mod_base = um
  source 1..21: mol_type = other RNA
gcacctcctcttgncagaaat

SEQ ID NO: 1416 - RNA, 21 nt, synthetic construct
  modified_base 1: mod_base = OTHER; note = 2'-O-methyladenosine
  modified_base 2: mod_base = cm
  modified_base 3: mod_base = gm
  modified_base 4: mod_base = OTHER; note = 2'-O-methyladenosine
  modified_base 5: mod_base = gm
  modified_base 6: mod_base = OTHER; note = 2'-O-methyladenosine
  modified_base 7: mod_base = um
  modified_base 8: mod_base = cm
  modified_base 9: mod_base = OTHER; note = 2'-fluoroadenosine
  modified_base 10: mod_base = OTHER; note = 2'-fluorouridine
  modified_base 11: mod_base = OTHER; note = 2'-fluorocytidine
  modified_base 12: mod_base = um
  modified_base 13: mod_base = um
  modified_base 14: mod_base = cm
  modified_base 15: mod_base = OTHER; note = 2'-O-methyladenosine
  modified_base 16: mod_base = OTHER; note = 2'-O-methyladenosine
  modified_base 17: mod_base = cm
  modified_base 18: mod_base = OTHER; note = 2'-O-methyladenosine
  modified_base 19: mod_base = OTHER; note = 2'-O-methyladenosine
  modified_base 20: mod_base = cm
  modified_base 21: mod_base = OTHER; note = 2'-O-methyladenosine
  source 1..21: mol_type = other RNA
acgagatcatcttcaacaaca

SEQ ID NO: 1417 - RNA, 21 nt, synthetic construct
  modified_base 1: mod_base = cm
  modified_base 2: mod_base = gm
  modified_base 3: mod_base = OTHER; note = 2'-O-methyladenosine
  modified_base 4: mod_base = gm
  modified_base 5: mod_base = OTHER; note = 2'-O-methyladenosine
  modified_base 6: mod_base = um
  modified_base 7: mod_base = cm
  modified_base 8: mod_base = OTHER; note = 2'-O-methyladenosine
  modified_base 9: mod_base = OTHER; note = 2'-fluorouridine
  modified_base 10: mod_base = OTHER; note = 2'-fluorocytidine
  modified_base 11: mod_base = OTHER; note = 2'-fluorouridine
  modified_base 12: mod_base = um
  modified_base 13: mod_base = cm
  modified_base 14: mod_base = OTHER; note = 2'-O-methyladenosine
  modified_base 15: mod_base = OTHER; note = 2'-O-methyladenosine
  modified_base 16: mod_base = cm
  modified_base 17: mod_base = OTHER; note = 2'-O-methyladenosine
  modified_base 18: mod_base = OTHER; note = 2'-O-methyladenosine
  modified_base 19: mod_base = cm
  modified_base 20: mod_base = OTHER; note = 2'-O-methyladenosine
  modified_base 21: mod_base = OTHER; note = 2'-O-methyladenosine
  source 1..21: mol_type = other RNA
cgagatcatcttcaacaacaa

SEQ ID NO: 1418 - RNA, 21 nt, synthetic construct
  modified_base 1: mod_base = gm
  modified_base 2: mod_base = cm
  modified_base 3: mod_base = OTHER; note = 2'-O-methyladenosine
  modified_base 4: mod_base = OTHER; note = 2'-O-methyladenosine
  modified_base 5: mod_base = gm
  modified_base 6: mod_base = gm
  modified_base 7: mod_base = OTHER; note = 2'-O-methyladenosine
  modified_base 8: mod_base = OTHER; note = 2'-O-methyladenosine
  modified_base 9: mod_base = OTHER; note = 2'-fluoroadenosine
  modified_base 10: mod_base = OTHER; note = 2'-fluorocytidine
  modified_base 11: mod_base = OTHER; note = 2'-fluorocytidine
  modified_base 12: mod_base = um
  modified_base 13: mod_base = OTHER; note = 2'-O-methyladenosine
  modified_base 14: mod_base = cm
  modified_base 15: mod_base = OTHER; note = 2'-O-methyladenosine
  modified_base 16: mod_base = OTHER; note = 2'-O-methyladenosine
  modified_base 17: mod_base = cm
  modified_base 18: mod_base = OTHER; note = 2'-O-methyladenosine
  modified_base 19: mod_base = OTHER; note = 2'-O-methyladenosine
  modified_base 20: mod_base = cm
  modified_base 21: mod_base = OTHER; note = 2'-O-methyladenosine
  source 1..21: mol_type = other RNA
gcaaggaaacctacaacaaca

SEQ ID NO: 1419 - RNA, 21 nt, synthetic construct
  modified_base 1: mod_base = gm
  modified_base 2: mod_base = cm
  modified_base 3: mod_base = OTHER; note = 2'-O-methyladenosine
  modified_base 4: mod_base = OTHER; note = 2'-O-methyladenosine
  modified_base 5: mod_base = gm
  modified_base 6: mod_base = gm
  modified_base 7: mod_base = OTHER; note = 2'-fluoroadenosine
  modified_base 8: mod_base = OTHER; note = 2'-O-methyladenosine
  modified_base 9: mod_base = OTHER; note = 2'-fluoroadenosine
  modified_base 10: mod_base = cm
  modified_base 11: mod_base = OTHER; note = 2'-fluorocytidine
  modified_base 12: mod_base = um
  modified_base 13: mod_base = OTHER; note = 2'-O-methyladenosine
  modified_base 14: mod_base = cm
  modified_base 15: mod_base = OTHER; note = 2'-O-methyladenosine
  modified_base 16: mod_base = OTHER; note = 2'-O-methyladenosine
  modified_base 17: mod_base = cm
  modified_base 18: mod_base = OTHER; note = 2'-O-methyladenosine
  modified_base 19: mod_base = OTHER; note = 2'-O-methyladenosine
  modified_base 20: mod_base = cm
  modified_base 21: mod_base = OTHER; note = 2'-O-methyladenosine
  source 1..21: mol_type = other RNA
gcaaggaaacctacaacaaca

SEQ ID NO: 1420 - RNA, 21 nt, synthetic construct
  modified_base 1: mod_base = gm
  modified_base 2: mod_base = cm
  modified_base 3: mod_base = um
  modified_base 4: mod_base = gm
  modified_base 5: mod_base = OTHER; note = 2'-O-methyladenosine
  modified_base 6: mod_base = um
  modified_base 7: mod_base = OTHER; note = 2'-fluorouridine
  modified_base 8: mod_base = um
  modified_base 9: mod_base = OTHER; note = 2'-fluoroguanosine
  modified_base 10: mod_base = cm
  modified_base 11: mod_base = OTHER; note = 2'-fluorocytidine
  modified_base 12: mod_base = um
  modified_base 13: mod_base = gm
  modified_base 14: mod_base = OTHER; note = 2'-O-methyladenosine
  modified_base 15: mod_base = OTHER; note = 2'-O-methyladenosine
  modified_base 16: mod_base = cm
  modified_base 17: mod_base = OTHER; note = 2'-O-methyladenosine
  modified_base 18: mod_base = OTHER; note = 2'-O-methyladenosine
  modified_base 19: mod_base = gm
  modified_base 20: mod_base = OTHER; note = 2'-O-methyladenosine
  modified_base 21: mod_base = OTHER; note = 2'-O-methyladenosine
  source 1..21: mol_type = other RNA
gctgatttgcctgaacaagaa

SEQ ID NO: 1421 - RNA, 21 nt, synthetic construct
  modified_base 1: mod_base = gm
  modified_base 2: mod_base = cm
  modified_base 3: mod_base = um
  modified_base 4: mod_base = gm
  modified_base 5: mod_base = OTHER; note = 2'-O-methyladenosine
  modified_base 6: mod_base = um
  modified_base 7: mod_base = OTHER; note = 2'-fluorouridine
  modified_base 8: mod_base = um
  modified_base 9: mod_base = OTHER; note = 2'-fluoroguanosine
  modified_base 10: mod_base = cm
  modified_base 11: mod_base = OTHER; note = 2'-fluorocytidine
  modified_base 12: mod_base = um
  modified_base 13: mod_base = gm
  modified_base 14: mod_base = OTHER; note = 2 -O-methyl-2-aminoadenosine
  modified_base 15: mod_base = OTHER; note = 2'-O-methyladenosine
  modified_base 16: mod_base = cm
  modified_base 17: mod_base = OTHER; note = 2'-O-methyladenosine
  modified_base 18: mod_base = OTHER; note = 2'-O-methyladenosine
  modified_base 19: mod_base = gm
  modified_base 20: mod_base = OTHER; note = 2'-O-methyladenosine
  modified_base 21: mod_base = OTHER; note = 2'-O-methyladenosine
  source 1..21: mol_type = other RNA
gctgatttgcctgnacaagaa

SEQ ID NO: 1422 - RNA, 21 nt, synthetic construct
  modified_base 1: mod_base = gm
  modified_base 2: mod_base = gm
  modified_base 3: mod_base = cm
  modified_base 4: mod_base = um
  modified_base 5: mod_base = gm
  modified_base 6: mod_base = OTHER; note = 2'-O-methyladenosine
  modified_base 7: mod_base = OTHER; note = 2'-fluorouridine
  modified_base 8: mod_base = um
  modified_base 9: mod_base = OTHER; note = 2'-fluorouridine
  modified_base 10: mod_base = gm
  modified_base 11: mod_base = OTHER; note = 2'-fluorocytidine
  modified_base 12: mod_base = cm
  modified_base 13: mod_base = um
  modified_base 14: mod_base = gm
  modified_base 15: mod_base = OTHER; note = 2'-O-methyladenosine
  modified_base 16: mod_base = OTHER; note = 2'-O-methyladenosine
  modified_base 17: mod_base = cm
  modified_base 18: mod_base = OTHER; note = 2'-O-methyladenosine
  modified_base 19: mod_base = OTHER; note = 2'-O-methyladenosine
  modified_base 20: mod_base = gm
  modified_base 21: mod_base = OTHER; note = 2'-O-methyladenosine
  source 1..21: mol_type = other RNA
ggctgatttgcctgaacaaga

SEQ ID NO: 1423 - RNA, 21 nt, synthetic construct
  modified_base 1: mod_base = gm
  modified_base 2: mod_base = gm
  modified_base 3: mod_base = OTHER; note = 2'-O-methyladenosine
  modified_base 4: mod_base = cm
  modified_base 5: mod_base = cm
  modified_base 6: mod_base = OTHER; note = 2'-O-methyladenosine
  modified_base 7: mod_base = OTHER; note = 2'-fluoroguanosine
  modified_base 8: mod_base = cm
  modified_base 9: mod_base = OTHER; note = 2'-fluoroadenosine
  modified_base 10: mod_base = um
  modified_base 11: mod_base = OTHER; note = 2'-fluorocytidine
  modified_base 12: mod_base = um
  modified_base 13: mod_base = um
  modified_base 14: mod_base = cm
  modified_base 15: mod_base = OTHER; note = 2'-O-methyladenosine
  modified_base 16: mod_base = um
  modified_base 17: mod_base = cm
  modified_base 18: mod_base = OTHER; note = 2'-O-methyladenosine
  modified_base 19: mod_base = OTHER; note = 2'-O-methyladenosine
  modified_base 20: mod_base = cm
  modified_base 21: mod_base = OTHER; note = 2'-O-methyladenosine
  source 1..21: mol_type = other RNA
ggaccagcatcttcatcaaca

SEQ ID NO: 1424 - RNA, 21 nt, synthetic construct
  modified_base 1: mod_base = cm
  modified_base 1^2: mod_base = OTHER; note = phosphorothioate linkage
  modified_base 2: mod_base = gm
  modified_base 3: mod_base = OTHER; note = 2'-O-methyladenosine
  modified_base 4: mod_base = gm
  modified_base 5: mod_base = OTHER; note = 2'-O-methyladenosine
  modified_base 6: mod_base = um
  modified_base 7: mod_base = cm
  modified_base 8: mod_base = OTHER; note = 2'-O-methyladenosine
  modified_base 9: mod_base = OTHER; note = 2'-fluorouridine
  modified_base 10: mod_base = OTHER; note = 2'-fluorocytidine
  modified_base 11: mod_base = OTHER; note = 2'-fluorouridine
  modified_base 12: mod_base = um
  modified_base 13: mod_base = cm
  modified_base 14: mod_base = OTHER; note = 2 -O-methyl-2-aminoadenosine
  modified_base 15: mod_base = OTHER; note = 2'-O-methyladenosine
  modified_base 16: mod_base = cm
  modified_base 17: mod_base = OTHER; note = 2'-O-methyladenosine
  modified_base 18: mod_base = OTHER; note = 2'-O-methyladenosine
  modified_base 19: mod_base = cm
  modified_base 20: mod_base = OTHER; note = 2'-O-methyladenosine
  modified_base 21: mod_base = OTHER; note = 2'-O-methyladenosine
  source 1..21: mol_type = other RNA
cgagatcatcttcnacaacaa

SEQ ID NO: 1425 - RNA, 21 nt, synthetic construct
  modified_base 1: mod_base = cm
  modified_base 2: mod_base = OTHER; note = 2'-O-methyladenosine
  modified_base 3: mod_base = um
  modified_base 4: mod_base = cm
  modified_base 5: mod_base = um
  modified_base 6: mod_base = um
  modified_base 7: mod_base = um
  modified_base 8: mod_base = gm
  modified_base 9: mod_base = OTHER; note = 2'-fluoroadenosine
  modified_base 10: mod_base = OTHER; note = 2'-fluorouridine
  modified_base 11: mod_base = OTHER; note = 2'-fluoroguanosine
  modified_base 12: mod_base = OTHER; note = 2'-O-methyladenosine
  modified_base 13: mod_base = gm
  modified_base 14: mod_base = gm
  modified_base 15: mod_base = OTHER; note = 2'-O-methyladenosine
  modified_base 16: mod_base = cm
  modified_base 17: mod_base = OTHER; note = 2'-O-methyladenosine
  modified_base 18: mod_base = OTHER; note = 2'-O-methyladenosine
  modified_base 19: mod_base = gm
  modified_base 20: mod_base = OTHER; note = 2'-O-methyladenosine
  modified_base 21: mod_base = um
  source 1..21: mol_type = other RNA
catctttgatgaggacaagat

SEQ ID NO: 1426 - RNA, 21 nt, synthetic construct
  modified_base 1: mod_base = gm
  modified_base 2: mod_base = cm
  modified_base 3: mod_base = um
  modified_base 4: mod_base = um
  modified_base 5: mod_base = um
  modified_base 6: mod_base = gm
  modified_base 7: mod_base = OTHER; note = 2'-O-methyladenosine
  modified_base 8: mod_base = um
  modified_base 9: mod_base = OTHER; note = 2'-fluoroguanosine
  modified_base 10: mod_base = OTHER; note = 2'-fluoroadenosine
  modified_base 11: mod_base = OTHER; note = 2'-fluoroguanosine
  modified_base 12: mod_base = gm
  modified_base 13: mod_base = OTHER; note = 2'-O-methyladenosine
  modified_base 14: mod_base = cm
  modified_base 15: mod_base = OTHER; note = 2'-O-methyladenosine
  modified_base 16: mod_base = OTHER; note = 2'-O-methyladenosine
  modified_base 17: mod_base = gm
  modified_base 18: mod_base = OTHER; note = 2'-O-methyladenosine
  modified_base 19: mod_base = um
  modified_base 20: mod_base = gm
  modified_base 21: mod_base = OTHER; note = 2'-O-methyladenosine
  source 1..21: mol_type = other RNA
gctttgatgaggacaagatga

SEQ ID NO: 1427 - RNA, 21 nt, synthetic construct
  modified_base 1: mod_base = gm
  modified_base 2: mod_base = um
  modified_base 3: mod_base = cm
  modified_base 4: mod_base = um
  modified_base 5: mod_base = cm
  modified_base 6: mod_base = um
  modified_base 7: mod_base = gm
  modified_base 8: mod_base = cm
  modified_base 9: mod_base = OTHER; note = 2'-fluorouridine
  modified_base 10: mod_base = OTHER; note = 2'-fluorocytidine
  modified_base 11: mod_base = OTHER; note = 2'-fluorocytidine
  modified_base 12: mod_base = um
  modified_base 13: mod_base = OTHER; note = 2'-O-methyladenosine
  modified_base 14: mod_base = cm
  modified_base 15: mod_base = OTHER; note = 2'-O-methyladenosine
  modified_base 16: mod_base = OTHER; note = 2'-O-methyladenosine
  modified_base 17: mod_base = cm
  modified_base 18: mod_base = um
  modified_base 19: mod_base = OTHER; note = 2'-O-methyladenosine
  modified_base 20: mod_base = gm
  modified_base 21: mod_base = OTHER; note = 2'-O-methyladenosine
  source 1..21: mol_type = other RNA
gtctctgctcctacaactaga

SEQ ID NO: 1428 - RNA, 21 nt, synthetic construct
  modified_base 1: mod_base = cm
  modified_base 2: mod_base = OTHER; note = 2'-O-methyladenosine
  modified_base 3: mod_base = OTHER; note = 2'-O-methyladenosine
  modified_base 4: mod_base = cm
  modified_base 5: mod_base = cm
  modified_base 6: mod_base = um
  modified_base 7: mod_base = cm
  modified_base 8: mod_base = um
  modified_base 9: mod_base = OTHER; note = 2'-fluoroguanosine
  modified_base 10: mod_base = OTHER; note = 2'-fluorocytidine
  modified_base 11: mod_base = OTHER; note = 2'-fluorouridine
  modified_base 12: mod_base = um
  modified_base 13: mod_base = cm
  modified_base 14: mod_base = um
  modified_base 15: mod_base = OTHER; note = 2'-O-methyladenosine
  modified_base 16: mod_base = cm
  modified_base 17: mod_base = OTHER; note = 2'-O-methyladenosine
  modified_base 18: mod_base = OTHER; note = 2'-O-methyladenosine
  modified_base 19: mod_base = cm
  modified_base 20: mod_base = um
  modified_base 21: mod_base = OTHER; note = 2'-O-methyladenosine
  source 1..21: mol_type = other RNA
caacctctgcttctacaacta

SEQ ID NO: 1429 - RNA, 21 nt, synthetic construct
  modified_base 1: mod_base = cm
  modified_base 2: mod_base = um
  modified_base 3: mod_base = OTHER; note = 2 -O-methyl-2-aminoadenosine
  modified_base 4: mod_base = um
  modified_base 5: mod_base = OTHER; note = 2'-O-methyladenosine
  modified_base 6: mod_base = OTHER; note = 2'-O-methyladenosine
  modified_base 7: mod_base = cm
  modified_base 8: mod_base = cm
  modified_base 9: mod_base = OTHER; note = 2'-fluoroadenosine
  modified_base 10: mod_base = OTHER; note = 2'-fluoroguanosine
  modified_base 11: mod_base = OTHER; note = 2'-fluorocytidine
  modified_base 12: mod_base = OTHER; note = 2'-O-methyladenosine
  modified_base 13: mod_base = cm
  modified_base 14: mod_base = OTHER; note = 2'-O-methyladenosine
  modified_base 15: mod_base = OTHER; note = 2'-O-methyladenosine
  modified_base 16: mod_base = cm
  modified_base 17: mod_base = um
  modified_base 18: mod_base = um
  modified_base 19: mod_base = cm
  modified_base 20: mod_base = um
  modified_base 21: mod_base = OTHER; note = 2'-O-methyladenosine
  source 1..21: mol_type = other RNA
ctntaaccagcacaacttcta

SEQ ID NO: 1430 - RNA, 21 nt, synthetic construct
  modified_base 1: mod_base = cm
  modified_base 2: mod_base = um
  modified_base 3: mod_base = OTHER; note = 2'-O-methyladenosine
  modified_base 4: mod_base = um
  modified_base 5: mod_base = OTHER; note = 2'-O-methyladenosine
  modified_base 6: mod_base = OTHER; note = 2'-O-methyladenosine
  modified_base 7: mod_base = cm
  modified_base 8: mod_base = cm
  modified_base 9: mod_base = OTHER; note = 2'-fluoroadenosine
  modified_base 10: mod_base = OTHER; note = 2'-fluoroguanosine
  modified_base 11: mod_base = OTHER; note = 2'-fluorocytidine
  modified_base 12: mod_base = OTHER; note = 2'-O-methyladenosine
  modified_base 13: mod_base = cm
  modified_base 14: mod_base = OTHER; note = 2'-O-methyladenosine
  modified_base 15: mod_base = OTHER; note = 2'-O-methyladenosine
  modified_base 16: mod_base = cm
  modified_base 17: mod_base = um
  modified_base 18: mod_base = um
  modified_base 19: mod_base = cm
  modified_base 20: mod_base = um
  modified_base 21: mod_base = OTHER; note = 2'-O-methyladenosine
  source 1..21: mol_type = other RNA
ctataaccagcacaacttcta

SEQ ID NO: 1431 - RNA, 21 nt, synthetic construct
  modified_base 1: mod_base = gm
  modified_base 2: mod_base = cm
  modified_base 3: mod_base = um
  modified_base 4: mod_base = gm
  modified_base 5: mod_base = um
  modified_base 6: mod_base = um
  modified_base 7: mod_base = cm
  modified_base 8: mod_base = um
  modified_base 9: mod_base = OTHER; note = 2'-fluoroguanosine
  modified_base 10: mod_base = cm
  modified_base 11: mod_base = OTHER; note = 2'-fluoroguanosine
  modified_base 12: mod_base = OTHER; note = 2'-O-methyladenosine
  modified_base 13: mod_base = OTHER; note = 2'-fluorocytidine
  modified_base 14: mod_base = um
  modified_base 15: mod_base = OTHER; note = 2'-O-methyladenosine
  modified_base 16: mod_base = cm
  modified_base 17: mod_base = um
  modified_base 18: mod_base = OTHER; note = 2'-O-methyladenosine
  modified_base 19: mod_base = cm
  modified_base 20: mod_base = OTHER; note = 2'-O-methyladenosine
  modified_base 21: mod_base = OTHER; note = 2'-O-methyladenosine
  source 1..21: mol_type = other RNA
gctgttctgcgactactacaa

SEQ ID NO: 1432 - RNA, 21 nt, synthetic construct
  modified_base 1: mod_base = gm
  modified_base 2: mod_base = cm
  modified_base 3: mod_base = um
  modified_base 4: mod_base = gm
  modified_base 5: mod_base = um
  modified_base 6: mod_base = um
  modified_base 7: mod_base = OTHER; note = 2'-fluorocytidine
  modified_base 8: mod_base = um
  modified_base 9: mod_base = OTHER; note = 2'-fluoroguanosine
  modified_base 10: mod_base = cm
  modified_base 11: mod_base = OTHER; note = 2'-fluoroguanosine
  modified_base 12: mod_base = OTHER; note = 2'-O-methyladenosine
  modified_base 13: mod_base = cm
  modified_base 14: mod_base = um
  modified_base 15: mod_base = OTHER; note = 2'-O-methyladenosine
  modified_base 16: mod_base = cm
  modified_base 17: mod_base = um
  modified_base 18: mod_base = OTHER; note = 2'-O-methyladenosine
  modified_base 19: mod_base = cm
  modified_base 20: mod_base = OTHER; note = 2'-O-methyladenosine
  modified_base 21: mod_base = OTHER; note = 2'-O-methyladenosine
  source 1..21: mol_type = other RNA
gctgttctgcgactactacaa

SEQ ID NO: 1433 - RNA, 21 nt, synthetic construct
  modified_base 1: mod_base = gm
  modified_base 2: mod_base = cm
  modified_base 3: mod_base = um
  modified_base 4: mod_base = gm
  modified_base 5: mod_base = um
  modified_base 6: mod_base = um
  modified_base 7: mod_base = cm
  modified_base 8: mod_base = um
  modified_base 9: mod_base = OTHER; note = 2'-fluoroguanosine
  modified_base 10: mod_base = cm
  modified_base 11: mod_base = OTHER; note = 2'-fluoroguanosine
  modified_base 12: mod_base = OTHER; note = 2'-O-methyladenosine
  modified_base 13: mod_base = cm
  modified_base 14: mod_base = um
  modified_base 15: mod_base = OTHER; note = 2'-O-methyladenosine
  modified_base 16: mod_base = cm
  modified_base 17: mod_base = um
  modified_base 18: mod_base = OTHER; note = 2'-O-methyladenosine
  modified_base 19: mod_base = cm
  modified_base 20: mod_base = OTHER; note = 2'-O-methyladenosine
  modified_base 21: mod_base = OTHER; note = 2'-O-methyladenosine
  source 1..21: mol_type = other RNA
gctgttctgcgactactacaa

SEQ ID NO: 1434 - RNA, 21 nt, synthetic construct
  modified_base 1: mod_base = gm
  modified_base 2: mod_base = cm
  modified_base 3: mod_base = um
  modified_base 4: mod_base = gm
  modified_base 5: mod_base = um
  modified_base 6: mod_base = um
  modified_base 7: mod_base = um
  modified_base 8: mod_base = um
  modified_base 9: mod_base = OTHER; note = 2'-fluoroguanosine
  modified_base 10: mod_base = cm
  modified_base 11: mod_base = OTHER; note = 2'-fluoroguanosine
  modified_base 12: mod_base = OTHER; note = 2'-O-methyladenosine
  modified_base 13: mod_base = cm
  modified_base 14: mod_base = um
  modified_base 15: mod_base = OTHER; note = 2'-O-methyladenosine
  modified_base 16: mod_base = cm
  modified_base 17: mod_base = um
  modified_base 18: mod_base = OTHER; note = 2'-O-methyladenosine
  modified_base 19: mod_base = cm
  modified_base 20: mod_base = OTHER; note = 2'-O-methyladenosine
  modified_base 21: mod_base = OTHER; note = 2'-O-methyladenosine
  source 1..21: mol_type = other RNA
gctgttttgcgactactacaa

SEQ ID NO: 1435 - RNA, 21 nt, synthetic construct
  modified_base 1: mod_base = gm
  modified_base 2: mod_base = cm
  modified_base 3: mod_base = um
  modified_base 4: mod_base = gm
  modified_base 5: mod_base = um
  modified_base 6: mod_base = um
  modified_base 7: mod_base = cm
  modified_base 8: mod_base = um
  modified_base 9: mod_base = OTHER; note = 2'-fluoroguanosine
  modified_base 10: mod_base = cm
  modified_base 11: mod_base = OTHER; note = 2'-fluoroguanosine
  modified_base 12: mod_base = OTHER; note = 2'-O-methyladenosine
  modified_base 13: mod_base = um
  modified_base 14: mod_base = um
  modified_base 15: mod_base = OTHER; note = 2'-O-methyladenosine
  modified_base 16: mod_base = cm
  modified_base 17: mod_base = um
  modified_base 18: mod_base = OTHER; note = 2'-O-methyladenosine
  modified_base 19: mod_base = cm
  modified_base 20: mod_base = OTHER; note = 2'-O-methyladenosine
  modified_base 21: mod_base = OTHER; note = 2'-O-methyladenosine
  source 1..21: mol_type = other RNA
gctgttctgcgattactacaa

SEQ ID NO: 1436 - RNA, 21 nt, synthetic construct
  modified_base 1: mod_base = gm
  modified_base 2: mod_base = cm
  modified_base 3: mod_base = um
  modified_base 4: mod_base = gm
  modified_base 5: mod_base = um
  modified_base 6: mod_base = um
  modified_base 7: mod_base = cm
  modified_base 8: mod_base = um
  modified_base 9: mod_base = OTHER; note = 2'-fluoroguanosine
  modified_base 10: mod_base = cm
  modified_base 11: mod_base = OTHER; note = 2'-fluoroguanosine
  modified_base 12: mod_base = OTHER; note = 2'-O-methyladenosine
  modified_base 13: mod_base = cm
  modified_base 14: mod_base = um
  modified_base 15: mod_base = OTHER; note = 2'-O-methyladenosine
  modified_base 16: mod_base = um
  modified_base 17: mod_base = um
  modified_base 18: mod_base = OTHER; note = 2'-O-methyladenosine
  modified_base 19: mod_base = cm
  modified_base 20: mod_base = OTHER; note = 2'-O-methyladenosine
  modified_base 21: mod_base = OTHER; note = 2'-O-methyladenosine
  source 1..21: mol_type = other RNA
gctgttctgcgactattacaa

SEQ ID NO: 1437 - RNA, 21 nt, synthetic construct
  modified_base 1: mod_base = gm
  modified_base 2: mod_base = cm
  modified_base 3: mod_base = um
  modified_base 4: mod_base = gm
  modified_base 5: mod_base = um
  modified_base 6: mod_base = um
  modified_base 7: mod_base = cm
  modified_base 8: mod_base = um
  modified_base 9: mod_base = OTHER; note = 2'-fluoroguanosine
  modified_base 10: mod_base = cm
  modified_base 11: mod_base = OTHER; note = 2'-fluoroguanosine
  modified_base 12: mod_base = OTHER; note = 2'-fluoroadenosine
  modified_base 13: mod_base = cm
  modified_base 14: mod_base = um
  modified_base 15: mod_base = OTHER; note = 2'-O-methyladenosine
  modified_base 16: mod_base = cm
  modified_base 17: mod_base = um
  modified_base 18: mod_base = OTHER; note = 2'-O-methyladenosine
  modified_base 19: mod_base = cm
  modified_base 20: mod_base = OTHER; note = 2'-O-methyladenosine
  modified_base 21: mod_base = OTHER; note = 2'-O-methyladenosine
  source 1..21: mol_type = other RNA
gctgttctgcgactactacaa

SEQ ID NO: 1438 - RNA, 21 nt, synthetic construct
  modified_base 1: mod_base = gm
  modified_base 2: mod_base = cm
  modified_base 3: mod_base = um
  modified_base 4: mod_base = gm
  modified_base 5: mod_base = OTHER; note = 2'-O-methyladenosine
  modified_base 6: mod_base = um
  modified_base 7: mod_base = um
  modified_base 8: mod_base = um
  modified_base 9: mod_base = OTHER; note = 2'-fluoroguanosine
  modified_base 10: mod_base = cm
  modified_base 11: mod_base = OTHER; note = 2'-fluorocytidine
  modified_base 12: mod_base = um
  modified_base 13: mod_base = gm
  modified_base 14: mod_base = OTHER; note = 2'-O-methyladenosine
  modified_base 15: mod_base = OTHER; note = 2'-O-methyladenosine
  modified_base 16: mod_base = cm
  modified_base 17: mod_base = OTHER; note = 2'-O-methyladenosine
  modified_base 18: mod_base = OTHER; note = 2'-O-methyladenosine
  modified_base 19: mod_base = gm
  modified_base 20: mod_base = OTHER; note = 2'-O-methyladenosine
  modified_base 21: mod_base = OTHER; note = 2'-O-methyladenosine
  source 1..21: mol_type = other RNA
gctgatttgcctgaacaagaa

SEQ ID NO: 1439 - RNA, 21 nt, synthetic construct
  modified_base 1: mod_base = gm
  modified_base 2: mod_base = cm
  modified_base 3: mod_base = um
  modified_base 4: mod_base = gm
  modified_base 5: mod_base = OTHER; note = 2'-O-methyladenosine
  modified_base 6: mod_base = um
  modified_base 7: mod_base = um
  modified_base 8: mod_base = um
  modified_base 9: mod_base = OTHER; note = 2'-fluoroguanosine
  modified_base 10: mod_base = cm
  modified_base 11: mod_base = OTHER; note = 2'-fluorocytidine
  modified_base 12: mod_base = um
  modified_base 13: mod_base = OTHER; note = 2'-fluoroguanosine
  modified_base 14: mod_base = OTHER; note = 2'-O-methyladenosine
  modified_base 15: mod_base = OTHER; note = 2'-O-methyladenosine
  modified_base 16: mod_base = cm
  modified_base 17: mod_base = OTHER; note = 2'-O-methyladenosine
  modified_base 18: mod_base = OTHER; note = 2'-O-methyladenosine
  modified_base 19: mod_base = gm
  modified_base 20: mod_base = OTHER; note = 2'-O-methyladenosine
  modified_base 21: mod_base = OTHER; note = 2'-O-methyladenosine
  source 1..21: mol_type = other RNA
gctgatttgcctgaacaagaa

SEQ ID NO: 1440 - RNA, 21 nt, synthetic construct
  modified_base 1: mod_base = cm
  modified_base 2: mod_base = cm
  modified_base 3: mod_base = um
  modified_base 4: mod_base = gm
  modified_base 5: mod_base = OTHER; note = 2'-O-methyladenosine
  modified_base 6: mod_base = um
  modified_base 7: mod_base = OTHER; note = 2'-fluorouridine
  modified_base 8: mod_base = um
  modified_base 9: mod_base = OTHER; note = 2'-fluoroguanosine
  modified_base 10: mod_base = cm
  modified_base 11: mod_base = OTHER; note = 2'-fluorocytidine
  modified_base 12: mod_base = um
  modified_base 13: mod_base = gm
  modified_base 14: mod_base = OTHER; note = 2'-O-methyladenosine
  modified_base 15: mod_base = OTHER; note = 2'-O-methyladenosine
  modified_base 16: mod_base = cm
  modified_base 17: mod_base = OTHER; note = 2'-O-methyladenosine
  modified_base 18: mod_base = OTHER; note = 2'-O-methyladenosine
  modified_base 19: mod_base = gm
  modified_base 20: mod_base = OTHER; note = 2'-O-methyladenosine
  modified_base 21: mod_base = OTHER; note = 2'-O-methyladenosine
  source 1..21: mol_type = other RNA
cctgatttgcctgaacaagaa

SEQ ID NO: 1441 - RNA, 21 nt, synthetic construct
  modified_base 1: mod_base = gm
  modified_base 1^2: mod_base = OTHER; note = phosphorothioate linkage
  modified_base 2: mod_base = cm
  modified_base 3: mod_base = um
  modified_base 4: mod_base = gm
  modified_base 5: mod_base = OTHER; note = 2'-O-methyladenosine
  modified_base 6: mod_base = um
  modified_base 7: mod_base = OTHER; note = 2'-fluorouridine
  modified_base 8: mod_base = um
  modified_base 9: mod_base = OTHER; note = 2'-fluoroguanosine
  modified_base 10: mod_base = cm
  modified_base 11: mod_base = OTHER; note = 2'-fluorocytidine
  modified_base 12: mod_base = um
  modified_base 13: mod_base = gm
  modified_base 14: mod_base = OTHER; note = 2'-O-methyladenosine
  modified_base 15: mod_base = OTHER; note = 2'-O-methyladenosine
  modified_base 16: mod_base = cm
  modified_base 17: mod_base = OTHER; note = 2'-O-methyladenosine
  modified_base 18: mod_base = OTHER; note = 2'-O-methyladenosine
  modified_base 19: mod_base = gm
  modified_base 20: mod_base = OTHER; note = 2'-O-methyladenosine
  modified_base 21: mod_base = OTHER; note = 2'-O-methyladenosine
  source 1..21: mol_type = other RNA
gctgatttgcctgaacaagaa

SEQ ID NO: 1442 - RNA, 21 nt, synthetic construct
  modified_base 1: mod_base = gm
  modified_base 1^2: mod_base = OTHER; note = phosphorothioate linkage
  modified_base 2: mod_base = cm
  modified_base 3: mod_base = um
  modified_base 4: mod_base = gm
  modified_base 5: mod_base = um
  modified_base 6: mod_base = um
  modified_base 7: mod_base = cm
  modified_base 8: mod_base = um
  modified_base 9: mod_base = OTHER; note = 2'-fluoroguanosine
  modified_base 10: mod_base = OTHER; note = 2'-fluorocytidine
  modified_base 11: mod_base = OTHER; note = 2'-fluoroguanosine
  modified_base 12: mod_base = OTHER; note = 2'-O-methyladenosine
  modified_base 13: mod_base = cm
  modified_base 14: mod_base = um
  modified_base 15: mod_base = OTHER; note = 2'-O-methyladenosine
  modified_base 16: mod_base = cm
  modified_base 17: mod_base = um
  modified_base 18: mod_base = OTHER; note = 2'-O-methyladenosine
  modified_base 19: mod_base = cm
  modified_base 20: mod_base = OTHER; note = 2'-O-methyladenosine
  modified_base 21: mod_base = OTHER; note = 2'-O-methyladenosine
  source 1..21: mol_type = other RNA
gctgttctgcgactactacaa

SEQ ID NO: 1443 - RNA, 22 nt, synthetic construct
  modified_base 1: mod_base = gm
  modified_base 1^2: mod_base = OTHER; note = phosphorothioate linkage
  modified_base 2: mod_base = cm
  modified_base 3: mod_base = um
  modified_base 4: mod_base = gm
  modified_base 5: mod_base = gm
  modified_base 6: mod_base = um
  modified_base 7: mod_base = um
  modified_base 8: mod_base = cm
  modified_base 9: mod_base = um
  modified_base 10: mod_base = OTHER; note = 2'-fluoroguanosine
  modified_base 11: mod_base = OTHER; note = 2'-fluorocytidine
  modified_base 12: mod_base = OTHER; note = 2'-fluoroguanosine
  modified_base 13: mod_base = OTHER; note = 2'-O-methyladenosine
  modified_base 14: mod_base = cm
  modified_base 15: mod_base = um
  modified_base 16: mod_base = OTHER; note = 2'-O-methyladenosine
  modified_base 17: mod_base = cm
  modified_base 18: mod_base = um
  modified_base 19: mod_base = OTHER; note = 2'-O-methyladenosine
  modified_base 20: mod_base = cm
  modified_base 21: mod_base = OTHER; note = 2'-O-methyladenosine
  modified_base 22: mod_base = OTHER; note = 2'-O-methyladenosine
  source 1..22: mol_type = other RNA
gctggttctgcgactactacaa

SEQ ID NO: 1444 - RNA, 20 nt, synthetic construct
  modified_base 1: mod_base = gm
  modified_base 1^2: mod_base = OTHER; note = phosphorothioate linkage
  modified_base 2: mod_base = cm
  modified_base 3: mod_base = gm
  modified_base 4: mod_base = um
  modified_base 5: mod_base = um
  modified_base 6: mod_base = cm
  modified_base 7: mod_base = um
  modified_base 8: mod_base = OTHER; note = 2'-fluoroguanosine
  modified_base 9: mod_base = OTHER; note = 2'-fluorocytidine
  modified_base 10: mod_base = OTHER; note = 2'-fluoroguanosine
  modified_base 11: mod_base = OTHER; note = 2'-O-methyladenosine
  modified_base 12: mod_base = cm
  modified_base 13: mod_base = um
  modified_base 14: mod_base = OTHER; note = 2'-O-methyladenosine
  modified_base 15: mod_base = cm
  modified_base 16: mod_base = um
  modified_base 17: mod_base = OTHER; note = 2'-O-methyladenosine
  modified_base 18: mod_base = cm
  modified_base 19: mod_base = OTHER; note = 2'-O-methyladenosine
  modified_base 20: mod_base = OTHER; note = 2'-O-methyladenosine
  source 1..20: mol_type = other RNA
gcgttctgcgactactacaa

SEQ ID NO: 1445 - RNA, 21 nt, synthetic construct
  modified_base 1: mod_base = gm
  modified_base 2: mod_base = cm
  modified_base 3: mod_base = um
  modified_base 4: mod_base = gm
  modified_base 5: mod_base = um
  modified_base 6: mod_base = um
  modified_base 7: mod_base = cm
  modified_base 8: mod_base = um
  modified_base 9: mod_base = OTHER; note = 2'-fluoroguanosine
  modified_base 10: mod_base = OTHER; note = 2'-fluorocytidine
  modified_base 11: mod_base = OTHER; note = 2'-fluoroguanosine
  modified_base 12: mod_base = OTHER; note = 2'-O-methyladenosine
  modified_base 13: mod_base = cm
  modified_base 14: mod_base = um
  modified_base 15: mod_base = OTHER; note = 2'-O-methyladenosine
  modified_base 16: mod_base = cm
  modified_base 17: mod_base = um
  modified_base 18: mod_base = OTHER; note = 2'-O-methyladenosine
  modified_base 19: mod_base = cm
  modified_base 20: mod_base = OTHER; note = 2'-O-methyladenosine
  modified_base 21: mod_base = OTHER; note = 2'-O-methyladenosine
  source 1..21: mol_type = other RNA
gctgttctgcgactactacaa

SEQ ID NO: 1446 - RNA, 21 nt, synthetic construct
  modified_base 1: mod_base = gm
  modified_base 2: mod_base = OTHER; note = 2'-O-methyladenosine
  modified_base 3: mod_base = gm
  modified_base 4: mod_base = um
  modified_base 5: mod_base = gm
  modified_base 6: mod_base = gm
  modified_base 7: mod_base = um
  modified_base 8: mod_base = um
  modified_base 9: mod_base = OTHER; note = 2'-fluorocytidine
  modified_base 10: mod_base = OTHER; note = 2'-fluoroguanosine
  modified_base 11: mod_base = OTHER; note = 2'-fluoroadenosine
  modified_base 12: mod_base = cm
  modified_base 13: mod_base = gm
  modified_base 14: mod_base = um
  modified_base 15: mod_base = gm
  modified_base 16: mod_base = OTHER; note = 2'-O-methylinosine
  modified_base 17: mod_base = OTHER; note = 2'-O-methyladenosine
  modified_base 18: mod_base = cm
  modified_base 19: mod_base = um
  modified_base 20: mod_base = um
  modified_base 21: mod_base = OTHER; note = 2'-O-methyladenosine
  source 1..21: mol_type = other RNA
gagtggttcgacgtgnactta

SEQ ID NO: 1447 - RNA, 21 nt, synthetic construct
  modified_base 1: mod_base = gm
  modified_base 2: mod_base = gm
  modified_base 3: mod_base = OTHER; note = 2'-O-methyladenosine
  modified_base 4: mod_base = cm
  modified_base 5: mod_base = cm
  modified_base 6: mod_base = OTHER; note = 2'-O-methyladenosine
  modified_base 7: mod_base = gm
  modified_base 8: mod_base = cm
  modified_base 9: mod_base = OTHER; note = 2'-fluoroadenosine
  modified_base 10: mod_base = OTHER; note = 2'-fluorouridine
  modified_base 11: mod_base = OTHER; note = 2'-fluorocytidine
  modified_base 12: mod_base = um
  modified_base 13: mod_base = um
  modified_base 14: mod_base = cm
  modified_base 15: mod_base = OTHER; note = 2'-O-methyladenosine
  modified_base 16: mod_base = um
  modified_base 17: mod_base = cm
  modified_base 18: mod_base = OTHER; note = 2'-O-methyladenosine
  modified_base 19: mod_base = OTHER; note = 2'-O-methyladenosine
  modified_base 20: mod_base = cm
  modified_base 21: mod_base = OTHER; note = 2'-O-methyladenosine
  source 1..21: mol_type = other RNA
ggaccagcatcttcatcaaca

SEQ ID NO: 1448 - RNA, 21 nt, synthetic construct
  modified_base 1: mod_base = gm
  modified_base 2: mod_base = cm
  modified_base 3: mod_base = um
  modified_base 4: mod_base = gm
  modified_base 5: mod_base = OTHER; note = 2'-O-methyladenosine
  modified_base 6: mod_base = um
  modified_base 7: mod_base = um
  modified_base 8: mod_base = um
  modified_base 9: mod_base = OTHER; note = 2'-fluoroguanosine
  modified_base 10: mod_base = OTHER; note = 2'-fluorocytidine
  modified_base 11: mod_base = OTHER; note = 2'-fluorocytidine
  modified_base 12: mod_base = um
  modified_base 13: mod_base = gm
  modified_base 14: mod_base = OTHER; note = 2'-O-methyladenosine
  modified_base 15: mod_base = OTHER; note = 2'-O-methyladenosine
  modified_base 16: mod_base = cm
  modified_base 17: mod_base = OTHER; note = 2'-O-methyladenosine
  modified_base 18: mod_base = OTHER; note = 2'-O-methyladenosine
  modified_base 19: mod_base = gm
  modified_base 20: mod_base = OTHER; note = 2'-O-methyladenosine
  modified_base 21: mod_base = OTHER; note = 2'-O-methyladenosine
  source 1..21: mol_type = other RNA
gctgatttgcctgaacaagaa

SEQ ID NO: 1449 - RNA, 21 nt, synthetic construct
  modified_base 1: mod_base = cm
  modified_base 2: mod_base = OTHER; note = 2 -O-methyl-2-aminoadenosine
  modified_base 3: mod_base = OTHER; note = 2'-O-methyladenosine
  modified_base 4: mod_base = gm
  modified_base 5: mod_base = gm
  modified_base 6: mod_base = OTHER; note = 2'-O-methyladenosine
  modified_base 7: mod_base = OTHER; note = 2'-O-methyladenosine
  modified_base 8: mod_base = OTHER; note = 2'-O-methyladenosine
  modified_base 9: mod_base = OTHER; note = 2'-fluorocytidine
  modified_base 10: mod_base = OTHER; note = 2'-fluorocytidine
  modified_base 11: mod_base = OTHER; note = 2'-fluorouridine
  modified_base 12: mod_base = OTHER; note = 2'-O-methyladenosine
  modified_base 13: mod_base = cm
  modified_base 14: mod_base = OTHER; note = 2'-O-methyladenosine
  modified_base 15: mod_base = OTHER; note = 2'-O-methyladenosine
  modified_base 16: mod_base = cm
  modified_base 17: mod_base = OTHER; note = 2'-O-methyladenosine
  modified_base 18: mod_base = OTHER; note = 2'-O-methyladenosine
  modified_base 19: mod_base = cm
  modified_base 20: mod_base = OTHER; note = 2'-O-methyladenosine
  modified_base 21: mod_base = um
  source 1..21: mol_type = other RNA
cnaggaaacctacaacaacat

SEQ ID NO: 1450 - RNA, 21 nt, synthetic construct
  modified_base 1: mod_base = gm
  modified_base 2: mod_base = gm
  modified_base 3: mod_base = OTHER; note = 2'-O-methyladenosine
  modified_base 4: mod_base = OTHER; note = 2'-O-methyladenosine
  modified_base 5: mod_base = OTHER; note = 2'-O-methyladenosine
  modified_base 6: mod_base = cm
  modified_base 7: mod_base = cm
  modified_base 8: mod_base = um
  modified_base 9: mod_base = OTHER; note = 2'-fluoroadenosine
  modified_base 10: mod_base = OTHER; note = 2'-fluorocytidine
  modified_base 11: mod_base = OTHER; note = 2'-fluoroadenosine
  modified_base 12: mod_base = OTHER; note = 2'-O-methyladenosine
  modified_base 13: mod_base = cm
  modified_base 14: mod_base = OTHER; note = 2'-O-methyladenosine
  modified_base 15: mod_base = OTHER; note = 2'-O-methyladenosine
  modified_base 16: mod_base = cm
  modified_base 17: mod_base = OTHER; note = 2'-O-methyladenosine
  modified_base 18: mod_base = um
  modified_base 19: mod_base = cm
  modified_base 20: mod_base = OTHER; note = 2'-O-methyladenosine
  modified_base 21: mod_base = um
  source 1..21: mol_type = other RNA
ggaaacctacaacaacatcat

SEQ ID NO: 1451 - RNA, 21 nt, synthetic construct
  modified_base 1: mod_base = gm
  modified_base 2: mod_base = cm
  modified_base 3: mod_base = um
  modified_base 4: mod_base = gm
  modified_base 5: mod_base = cm
  modified_base 6: mod_base = um
  modified_base 7: mod_base = OTHER; note = 2'-O-methyladenosine
  modified_base 8: mod_base = cm
  modified_base 9: mod_base = OTHER; note = 2'-fluoroadenosine
  modified_base 10: mod_base = OTHER; note = 2'-fluoroadenosine
  modified_base 11: mod_base = OTHER; note = 2'-fluorocytidine
  modified_base 12: mod_base = um
  modified_base 13: mod_base = OTHER; note = 2'-O-methyladenosine
  modified_base 14: mod_base = cm
  modified_base 15: mod_base = cm
  modified_base 16: mod_base = OTHER; note = 2'-O-methyladenosine
  modified_base 17: mod_base = OTHER; note = 2'-O-methylinosine
  modified_base 18: mod_base = OTHER; note = 2'-O-methyladenosine
  modified_base 19: mod_base = um
  modified_base 20: mod_base = cm
  modified_base 21: mod_base = OTHER; note = 2'-O-methyladenosine
  source 1..21: mol_type = other RNA
gctgctacaactaccanatca

SEQ ID NO: 1452 - RNA, 21 nt, synthetic construct
  modified_base 1: mod_base = gm
  modified_base 2: mod_base = cm
  modified_base 3: mod_base = um
  modified_base 4: mod_base = OTHER; note = 2'-O-methyladenosine
  modified_base 5: mod_base = cm
  modified_base 6: mod_base = OTHER; note = 2'-O-methyladenosine
  modified_base 7: mod_base = OTHER; note = 2'-O-methyladenosine
  modified_base 8: mod_base = cm
  modified_base 9: mod_base = OTHER; note = 2'-fluorouridine
  modified_base 10: mod_base = OTHER; note = 2'-fluoroadenosine
  modified_base 11: mod_base = OTHER; note = 2'-fluorocytidine
  modified_base 12: mod_base = cm
  modified_base 13: mod_base = OTHER; note = 2'-O-methyladenosine
  modified_base 14: mod_base = gm
  modified_base 15: mod_base = OTHER; note = 2'-O-methyladenosine
  modified_base 16: mod_base = um
  modified_base 17: mod_base = cm
  modified_base 18: mod_base = OTHER; note = 2'-O-methyladenosine
  modified_base 19: mod_base = OTHER; note = 2'-O-methylinosine
  modified_base 20: mod_base = gm
  modified_base 21: mod_base = OTHER; note = 2'-O-methyladenosine
  source 1..21: mol_type = other RNA
gctacaactaccagatcanga

SEQ ID NO: 1453 - RNA, 21 nt, synthetic construct
  modified_base 1: mod_base = cm
  modified_base 2: mod_base = cm
  modified_base 3: mod_base = cm
  modified_base 4: mod_base = OTHER; note = 2'-O-methyladenosine
  modified_base 5: mod_base = cm
  modified_base 6: mod_base = cm
  modified_base 7: mod_base = cm
  modified_base 8: mod_base = OTHER; note = 2'-O-methyladenosine
  modified_base 9: mod_base = OTHER; note = 2'-fluorouridine
  modified_base 10: mod_base = OTHER; note = 2'-fluorocytidine
  modified_base 11: mod_base = OTHER; note = 2'-fluorouridine
  modified_base 12: mod_base = gm
  modified_base 13: mod_base = cm
  modified_base 14: mod_base = um
  modified_base 15: mod_base = OTHER; note = 2'-O-methyladenosine
  modified_base 16: mod_base = cm
  modified_base 17: mod_base = OTHER; note = 2'-O-methyladenosine
  modified_base 18: mod_base = OTHER; note = 2'-O-methyladenosine
  modified_base 19: mod_base = cm
  modified_base 20: mod_base = um
  modified_base 21: mod_base = OTHER; note = 2'-O-methyladenosine
  source 1..21: mol_type = other RNA
cccacccatctgctacaacta

SEQ ID NO: 1454 - RNA, 21 nt, synthetic construct
  modified_base 1: mod_base = gm
  modified_base 2: mod_base = OTHER; note = 2'-O-methyladenosine
  modified_base 3: mod_base = gm
  modified_base 4: mod_base = OTHER; note = 2'-O-methyladenosine
  modified_base 5: mod_base = um
  modified_base 6: mod_base = cm
  modified_base 7: mod_base = cm
  modified_base 8: mod_base = gm
  modified_base 9: mod_base = OTHER; note = 2'-fluorocytidine
  modified_base 10: mod_base = OTHER; note = 2'-fluoroadenosine
  modified_base 11: mod_base = OTHER; note = 2'-fluorouridine
  modified_base 12: mod_base = cm
  modified_base 13: mod_base = cm
  modified_base 14: mod_base = OTHER; note = 2'-O-methyladenosine
  modified_base 15: mod_base = gm
  modified_base 16: mod_base = um
  modified_base 17: mod_base = OTHER; note = 2'-O-methylinosine
  modified_base 18: mod_base = um
  modified_base 19: mod_base = um
  modified_base 20: mod_base = gm
  modified_base 21: mod_base = OTHER; note = 2'-O-methyladenosine
  source 1..21: mol_type = other RNA
gagatccgcatccagtnttga

SEQ ID NO: 1455 - RNA, 21 nt, synthetic construct
  modified_base 1: mod_base = cm
  modified_base 2: mod_base = cm
  modified_base 3: mod_base = OTHER; note = 2'-O-methyladenosine
  modified_base 4: mod_base = gm
  modified_base 5: mod_base = OTHER; note = 2'-O-methyladenosine
  modified_base 6: mod_base = gm
  modified_base 7: mod_base = gm
  modified_base 8: mod_base = um
  modified_base 9: mod_base = OTHER; note = 2'-fluoroguanosine
  modified_base 10: mod_base = OTHER; note = 2'-fluoroadenosine
  modified_base 11: mod_base = OTHER; note = 2'-fluoroguanosine
  modified_base 12: mod_base = cm
  modified_base 13: mod_base = OTHER; note = 2'-O-methyladenosine
  modified_base 14: mod_base = um
  modified_base 15: mod_base = cm
  modified_base 16: mod_base = OTHER; note = 2'-O-methylinosine
  modified_base 17: mod_base = OTHER; note = 2'-O-methyladenosine
  modified_base 18: mod_base = OTHER; note = 2'-O-methyladenosine
  modified_base 19: mod_base = cm
  modified_base 20: mod_base = OTHER; note = 2'-O-methyladenosine
  modified_base 21: mod_base = OTHER; note = 2'-O-methyladenosine
  source 1..21: mol_type = other RNA
ccagaggtgagcatcnaacaa

SEQ ID NO: 1456 - RNA, 21 nt, synthetic construct
  modified_base 1: mod_base = cm
  modified_base 2: mod_base = OTHER; note = 2'-O-methyladenosine
  modified_base 3: mod_base = gm
  modified_base 4: mod_base = cm
  modified_base 5: mod_base = OTHER; note = 2'-O-methyladenosine
  modified_base 6: mod_base = gm
  modified_base 7: mod_base = gm
  modified_base 8: mod_base = gm
  modified_base 9: mod_base = OTHER; note = 2'-fluoroadenosine
  modified_base 10: mod_base = OTHER; note = 2'-fluorocytidine
  modified_base 11: mod_base = OTHER; note = 2'-fluorocytidine
  modified_base 12: mod_base = cm
  modified_base 13: mod_base = um
  modified_base 14: mod_base = um
  modified_base 15: mod_base = cm
  modified_base 16: mod_base = OTHER; note = 2'-O-methyladenosine
  modified_base 17: mod_base = OTHER; note = 2'-O-methyladenosine
  modified_base 18: mod_base = gm
  modified_base 19: mod_base = OTHER; note = 2'-O-methyladenosine
  modified_base 20: mod_base = um
  modified_base 21: mod_base = OTHER; note = 2'-O-methyladenosine
  source 1..21: mol_type = other RNA
cagcagggacccttcaagata

SEQ ID NO: 1457 - RNA, 21 nt, synthetic construct
  modified_base 1: mod_base = cm
  modified_base 2: mod_base = OTHER; note = 2 -O-methyl-2-aminoadenosine
  modified_base 3: mod_base = OTHER; note = 2'-O-methyladenosine
  modified_base 4: mod_base = gm
  modified_base 5: mod_base = OTHER; note = 2'-O-methyladenosine
  modified_base 6: mod_base = um
  modified_base 7: mod_base = gm
  modified_base 8: mod_base = um
  modified_base 9: mod_base = OTHER; note = 2'-fluoroguanosine
  modified_base 10: mod_base = OTHER; note = 2'-fluorocytidine
  modified_base 11: mod_base = OTHER; note = 2'-fluorocytidine
  modified_base 12: mod_base = um
  modified_base 13: mod_base = cm
  modified_base 14: mod_base = OTHER; note = 2'-O-methyladenosine
  modified_base 15: mod_base = OTHER; note = 2'-O-methyladenosine
  modified_base 16: mod_base = cm
  modified_base 17: mod_base = um
  modified_base 18: mod_base = OTHER; note = 2'-O-methyladenosine
  modified_base 19: mod_base = cm
  modified_base 20: mod_base = OTHER; note = 2'-O-methylinosine
  modified_base 21: mod_base = OTHER; note = 2'-O-methyladenosine
  source 1..21: mol_type = other RNA
cnagatgtgcctcaactacna

SEQ ID NO: 1458 - RNA, 21 nt, synthetic construct
  modified_base 1: mod_base = cm
  modified_base 2: mod_base = OTHER; note = 2 -O-methyl-2-aminoadenosine
  modified_base 3: mod_base = OTHER; note = 2'-O-methyladenosine
  modified_base 4: mod_base = cm
  modified_base 5: mod_base = gm
  modified_base 6: mod_base = um
  modified_base 7: mod_base = cm
  modified_base 8: mod_base = OTHER; note = 2'-O-methyladenosine
  modified_base 9: mod_base = OTHER; note = 2'-fluorocytidine
  modified_base 10: mod_base = OTHER; note = 2'-fluorocytidine
  modified_base 11: mod_base = OTHER; note = 2'-fluoroadenosine
  modified_base 12: mod_base = um
  modified_base 13: mod_base = cm
  modified_base 14: mod_base = um
  modified_base 15: mod_base = um
  modified_base 16: mod_base = cm
  modified_base 17: mod_base = OTHER; note = 2'-O-methyladenosine
  modified_base 18: mod_base = OTHER; note = 2'-O-methylinosine
  modified_base 19: mod_base = OTHER; note = 2'-O-methyladenosine
  modified_base 20: mod_base = cm
  modified_base 21: mod_base = OTHER; note = 2'-O-methyladenosine
  source 1..21: mol_type = other RNA
cnacgtcaccatcttcanaca

SEQ ID NO: 1459 - RNA, 21 nt, synthetic construct
  modified_base 1: mod_base = gm
  modified_base 2: mod_base = OTHER; note = 2 -O-methyl-2-aminoadenosine
  modified_base 3: mod_base = OTHER; note = 2'-O-methyladenosine
  modified_base 4: mod_base = cm
  modified_base 5: mod_base = cm
  modified_base 6: mod_base = um
  modified_base 7: mod_base = OTHER; note = 2'-O-methyladenosine
  modified_base 8: mod_base = cm
  modified_base 9: mod_base = OTHER; note = 2'-fluorouridine
  modified_base 10: mod_base = OTHER; note = 2'-fluoroadenosine
  modified_base 11: mod_base = OTHER; note = 2'-fluorocytidine
  modified_base 12: mod_base = um
  modified_base 13: mod_base = cm
  modified_base 14: mod_base = gm
  modified_base 15: mod_base = OTHER; note = 2'-O-methyladenosine
  modified_base 16: mod_base = OTHER; note = 2'-O-methyladenosine
  modified_base 17: mod_base = cm
  modified_base 18: mod_base = um
  modified_base 19: mod_base = OTHER; note = 2'-O-methylinosine
  modified_base 20: mod_base = cm
  modified_base 21: mod_base = OTHER; note = 2'-O-methyladenosine
  source 1..21: mol_type = other RNA
gnacctactactcgaactnca

SEQ ID NO: 1460 - RNA, 21 nt, synthetic construct
  modified_base 1: mod_base = cm
  modified_base 2: mod_base = OTHER; note = 2 -O-methyl-2-aminoadenosine
  modified_base 3: mod_base = um
  modified_base 4: mod_base = gm
  modified_base 5: mod_base = um
  modified_base 6: mod_base = gm
  modified_base 7: mod_base = gm
  modified_base 8: mod_base = OTHER; note = 2'-O-methyladenosine
  modified_base 9: mod_base = OTHER; note = 2'-fluoroadenosine
  modified_base 10: mod_base = OTHER; note = 2'-fluorocytidine
  modified_base 11: mod_base = OTHER; note = 2'-fluorocytidine
  modified_base 12: mod_base = OTHER; note = 2'-O-methyladenosine
  modified_base 13: mod_base = cm
  modified_base 14: mod_base = gm
  modified_base 15: mod_base = OTHER; note = 2'-O-methyladenosine
  modified_base 16: mod_base = um
  modified_base 17: mod_base = OTHER; note = 2'-O-methylinosine
  modified_base 18: mod_base = OTHER; note = 2'-O-methyladenosine
  modified_base 19: mod_base = cm
  modified_base 20: mod_base = OTHER; note = 2'-O-methyladenosine
  modified_base 21: mod_base = OTHER; note = 2'-O-methyladenosine
  source 1..21: mol_type = other RNA
cntgtggaaccacgatnacaa

SEQ ID NO: 1461 - RNA, 21 nt, synthetic construct
  modified_base 1: mod_base = OTHER; note = 2'-O-methyladenosine
  modified_base 2: mod_base = gm
  modified_base 3: mod_base = gm
  modified_base 4: mod_base = cm
  modified_base 5: mod_base = OTHER; note = 2'-O-methyladenosine
  modified_base 6: mod_base = OTHER; note = 2'-O-methyladenosine
  modified_base 7: mod_base = gm
  modified_base 8: mod_base = OTHER; note = 2'-O-methyladenosine
  modified_base 9: mod_base = OTHER; note = 2'-fluorocytidine
  modified_base 10: mod_base = OTHER; note = 2'-fluorocytidine
  modified_base 11: mod_base = OTHER; note = 2'-fluorouridine
  modified_base 12: mod_base = cm
  modified_base 13: mod_base = um
  modified_base 14: mod_base = gm
  modified_base 15: mod_base = cm
  modified_base 16: mod_base = um
  modified_base 17: mod_base = um
  modified_base 18: mod_base = cm
  modified_base 19: mod_base = um
  modified_base 20: mod_base = OTHER; note = 2'-O-methylinosine
  modified_base 21: mod_base = um
  source 1..21: mol_type = other RNA
aggcaagacctctgcttctnt

SEQ ID NO: 1462 - RNA, 21 nt, synthetic construct
  modified_base 1: mod_base = gm
  modified_base 2: mod_base = cm
  modified_base 3: mod_base = OTHER; note = 2'-O-methyladenosine
  modified_base 4: mod_base = gm
  modified_base 5: mod_base = um
  modified_base 6: mod_base = gm
  modified_base 7: mod_base = cm
  modified_base 8: mod_base = cm
  modified_base 9: mod_base = OTHER; note = 2'-fluorouridine
  modified_base 10: mod_base = OTHER; note = 2'-fluorouridine
  modified_base 11: mod_base = OTHER; note = 2'-fluorocytidine
  modified_base 12: mod_base = OTHER; note = 2'-O-methyladenosine
  modified_base 13: mod_base = cm
  modified_base 14: mod_base = um
  modified_base 15: mod_base = gm
  modified_base 16: mod_base = um
  modified_base 17: mod_base = OTHER; note = 2'-O-methyladenosine
  modified_base 18: mod_base = cm
  modified_base 19: mod_base = um
  modified_base 20: mod_base = OTHER; note = 2'-O-methylinosine
  modified_base 21: mod_base = OTHER; note = 2'-O-methyladenosine
  source 1..21: mol_type = other RNA
gcagtgccttcactgtactna

SEQ ID NO: 1463 - RNA, 21 nt, synthetic construct
  modified_base 1: mod_base = gm
  modified_base 2: mod_base = um
  modified_base 3: mod_base = gm
  modified_base 4: mod_base = gm
  modified_base 5: mod_base = gm
  modified_base 6: mod_base = OTHER; note = 2'-O-methyladenosine
  modified_base 7: mod_base = OTHER; note = 2'-O-methyladenosine
  modified_base 8: mod_base = cm
  modified_base 9: mod_base = OTHER; note = 2'-fluorouridine
  modified_base 10: mod_base = OTHER; note = 2'-fluorouridine
  modified_base 11: mod_base = OTHER; note = 2'-fluorocytidine
  modified_base 12: mod_base = OTHER; note = 2'-O-methyladenosine
  modified_base 13: mod_base = OTHER; note = 2'-O-methyladenosine
  modified_base 14: mod_base = cm
  modified_base 15: mod_base = OTHER; note = 2'-O-methyladenosine
  modified_base 16: mod_base = OTHER; note = 2'-O-methylinosine
  modified_base 17: mod_base = cm
  modified_base 18: mod_base = OTHER; note = 2'-O-methyladenosine
  modified_base 19: mod_base = um
  modified_base 20: mod_base = cm
  modified_base 21: mod_base = OTHER; note = 2'-O-methyladenosine
  source 1..21: mol_type = other RNA
gtgggaacttcaacancatca

SEQ ID NO: 1464 - RNA, 21 nt, synthetic construct
  modified_base 1: mod_base = cm
  modified_base 2: mod_base = cm
  modified_base 3: mod_base = cm
  modified_base 4: mod_base = cm
  modified_base 5: mod_base = OTHER; note = 2'-O-methyladenosine
  modified_base 6: mod_base = OTHER; note = 2'-O-methyladenosine
  modified_base 7: mod_base = cm
  modified_base 8: mod_base = OTHER; note = 2'-O-methyladenosine
  modified_base 9: mod_base = OTHER; note = 2'-fluorouridine
  modified_base 10: mod_base = OTHER; note = 2'-fluorocytidine
  modified_base 11: mod_base = OTHER; note = 2'-fluoroadenosine
  modified_base 12: mod_base = gm
  modified_base 13: mod_base = gm
  modified_base 14: mod_base = OTHER; note = 2'-O-methyladenosine
  modified_base 15: mod_base = OTHER; note = 2'-O-methyladenosine
  modified_base 16: mod_base = cm
  modified_base 17: mod_base = OTHER; note = 2'-O-methyladenosine
  modified_base 18: mod_base = OTHER; note = 2'-O-methylinosine
  modified_base 19: mod_base = cm
  modified_base 20: mod_base = um
  modified_base 21: mod_base = um
  source 1..21: mol_type = other RNA
ccccaacatcaggaacanctt

SEQ ID NO: 1465 - RNA, 21 nt, synthetic construct
  modified_base 1: mod_base = cm
  modified_base 2: mod_base = cm
  modified_base 3: mod_base = um
  modified_base 4: mod_base = OTHER; note = 2'-O-methyladenosine
  modified_base 5: mod_base = cm
  modified_base 6: mod_base = um
  modified_base 7: mod_base = OTHER; note = 2'-O-methyladenosine
  modified_base 8: mod_base = cm
  modified_base 9: mod_base = OTHER; note = 2'-fluorouridine
  modified_base 10: mod_base = OTHER; note = 2'-fluorocytidine
  modified_base 11: mod_base = OTHER; note = 2'-fluoroguanosine
  modified_base 12: mod_base = OTHER; note = 2'-O-methyladenosine
  modified_base 13: mod_base = OTHER; note = 2'-O-methyladenosine
  modified_base 14: mod_base = cm
  modified_base 15: mod_base = um
  modified_base 16: mod_base = OTHER; note = 2'-O-methylinosine
  modified_base 17: mod_base = cm
  modified_base 18: mod_base = OTHER; note = 2'-O-methyladenosine
  modified_base 19: mod_base = um
  modified_base 20: mod_base = gm
  modified_base 21: mod_base = um
  source 1..21: mol_type = other RNA
cctactactcgaactncatgt

SEQ ID NO: 1466 - RNA, 21 nt, synthetic construct
  modified_base 1: mod_base = gm
  modified_base 2: mod_base = um
  modified_base 3: mod_base = cm
  modified_base 4: mod_base = OTHER; note = 2'-O-methyladenosine
  modified_base 5: mod_base = cm
  modified_base 6: mod_base = cm
  modified_base 7: mod_base = um
  modified_base 8: mod_base = gm
  modified_base 9: mod_base = OTHER; note = 2'-fluorocytidine
  modified_base 10: mod_base = OTHER; note = 2'-fluoroadenosine
  modified_base 11: mod_base = OTHER; note = 2'-fluoroguanosine
  modified_base 12: mod_base = um
  modified_base 13: mod_base = gm
  modified_base 14: mod_base = um
  modified_base 15: mod_base = um
  modified_base 16: mod_base = gm
  modified_base 17: mod_base = OTHER; note = 2'-O-methylinosine
  modified_base 18: mod_base = cm
  modified_base 19: mod_base = um
  modified_base 20: mod_base = um
  modified_base 21: mod_base = OTHER; note = 2'-O-methyladenosine
  source 1..21: mol_type = other RNA
gtcacctgcagtgttgnctta

SEQ ID NO: 1467 - RNA, 21 nt, synthetic construct
  modified_base 1: mod_base = gm
  modified_base 2: mod_base = cm
  modified_base 3: mod_base = um
  modified_base 4: mod_base = gm
  modified_base 5: mod_base = gm
  modified_base 6: mod_base = OTHER; note = 2'-O-methyladenosine
  modified_base 7: mod_base = cm
  modified_base 8: mod_base = OTHER; note = 2'-O-methyladenosine
  modified_base 9: mod_base = OTHER; note = 2'-fluorouridine
  modified_base 10: mod_base = OTHER; note = 2'-fluoroguanosine
  modified_base 11: mod_base = OTHER; note = 2'-fluoroadenosine
  modified_base 12: mod_base = cm
  modified_base 13: mod_base = cm
  modified_base 14: mod_base = um
  modified_base 15: mod_base = gm
  modified_base 16: mod_base = um
  modified_base 17: mod_base = um
  modified_base 18: mod_base = OTHER; note = 2'-O-methyladenosine
  modified_base 19: mod_base = cm
  modified_base 20: mod_base = OTHER; note = 2'-O-methyladenosine
  modified_base 21: mod_base = OTHER; note = 2'-O-methyladenosine
  source 1..21: mol_type = other RNA
gctggacatgacctgttacaa

SEQ ID NO: 1468 - RNA, 21 nt, synthetic construct
  modified_base 1: mod_base = gm
  modified_base 2: mod_base = cm
  modified_base 3: mod_base = OTHER; note = 2'-O-methyladenosine
  modified_base 4: mod_base = gm
  modified_base 5: mod_base = OTHER; note = 2'-O-methyladenosine
  modified_base 6: mod_base = gm
  modified_base 7: mod_base = cm
  modified_base 8: mod_base = um
  modified_base 9: mod_base = OTHER; note = 2'-fluoroadenosine
  modified_base 10: mod_base = OTHER; note = 2'-fluorocytidine
  modified_base 11: mod_base = OTHER; note = 2'-fluoroadenosine
  modified_base 12: mod_base = gm
  modified_base 13: mod_base = cm
  modified_base 14: mod_base = um
  modified_base 15: mod_base = um
  modified_base 16: mod_base = cm
  modified_base 17: mod_base = OTHER; note = 2'-O-methyladenosine
  modified_base 18: mod_base = OTHER; note = 2'-O-methyladenosine
  modified_base 19: mod_base = cm
  modified_base 20: mod_base = OTHER; note = 2'-O-methylinosine
  modified_base 21: mod_base = OTHER; note = 2'-O-methyladenosine
  source 1..21: mol_type = other RNA
gcagagctacagcttcaacna

SEQ ID NO: 1469 - RNA, 21 nt, synthetic construct
  modified_base 1: mod_base = OTHER; note = 2'-O-methyladenosine
  modified_base 2: mod_base = gm
  modified_base 3: mod_base = cm
  modified_base 4: mod_base = OTHER; note = 2'-O-methyladenosine
  modified_base 5: mod_base = gm
  modified_base 6: mod_base = um
  modified_base 7: mod_base = gm
  modified_base 8: mod_base = cm
  modified_base 9: mod_base = OTHER; note = 2'-fluorocytidine
  modified_base 10: mod_base = OTHER; note = 2'-fluorouridine
  modified_base 11: mod_base = OTHER; note = 2'-fluorouridine
  modified_base 12: mod_base = cm
  modified_base 13: mod_base = OTHER; note = 2'-O-methyladenosine
  modified_base 14: mod_base = cm
  modified_base 15: mod_base = um
  modified_base 16: mod_base = gm
  modified_base 17: mod_base = um
  modified_base 18: mod_base = OTHER; note = 2'-O-methyladenosine
  modified_base 19: mod_base = cm
  modified_base 20: mod_base = um
  modified_base 21: mod_base = OTHER; note = 2'-O-methyladenosine
  source 1..21: mol_type = other RNA
agcagtgccttcactgtacta

SEQ ID NO: 1470 - RNA, 21 nt, synthetic construct
  modified_base 1: mod_base = gm
  modified_base 2: mod_base = OTHER; note = 2'-O-methyladenosine
  modified_base 3: mod_base = cm
  modified_base 4: mod_base = OTHER; note = 2'-O-methyladenosine
  modified_base 5: mod_base = um
  modified_base 6: mod_base = cm
  modified_base 7: mod_base = OTHER; note = 2'-O-methyladenosine
  modified_base 8: mod_base = gm
  modified_base 9: mod_base = OTHER; note = 2'-fluoroguanosine
  modified_base 10: mod_base = OTHER; note = 2'-fluoroadenosine
  modified_base 11: mod_base = OTHER; note = 2'-fluoroadenosine
  modified_base 12: mod_base = cm
  modified_base 13: mod_base = OTHER; note = 2'-O-methyladenosine
  modified_base 14: mod_base = gm
  modified_base 15: mod_base = cm
  modified_base 16: mod_base = um
  modified_base 17: mod_base = um
  modified_base 18: mod_base = cm
  modified_base 19: mod_base = OTHER; note = 2'-O-methylinosine
  modified_base 20: mod_base = OTHER; note = 2'-O-methyladenosine
  modified_base 21: mod_base = OTHER; note = 2'-O-methyladenosine
  source 1..21: mol_type = other RNA
gacatcaggaacagcttcnaa

SEQ ID NO: 1471 - RNA, 21 nt, synthetic construct
  modified_base 1: mod_base = gm
  modified_base 2: mod_base = gm
  modified_base 3: mod_base = cm
  modified_base 4: mod_base = um
  modified_base 5: mod_base = gm
  modified_base 6: mod_base = OTHER; note = 2'-O-methyladenosine
  modified_base 7: mod_base = um
  modified_base 8: mod_base = um
  modified_base 9: mod_base = OTHER; note = 2'-fluorouridine
  modified_base 10: mod_base = OTHER; note = 2'-fluoroguanosine
  modified_base 11: mod_base = OTHER; note = 2'-fluorocytidine
  modified_base 12: mod_base = cm
  modified_base 13: mod_base = um
  modified_base 14: mod_base = gm
  modified_base 15: mod_base = OTHER; note = 2'-O-methyladenosine
  modified_base 16: mod_base = OTHER; note = 2'-O-methyladenosine
  modified_base 17: mod_base = cm
  modified_base 18: mod_base = OTHER; note = 2'-O-methyladenosine
  modified_base 19: mod_base = OTHER; note = 2'-O-methyladenosine
  modified_base 20: mod_base = gm
  modified_base 21: mod_base = OTHER; note = 2'-O-methyladenosine
  source 1..21: mol_type = other RNA
ggctgatttgcctgaacaaga

SEQ ID NO: 1472 - RNA, 21 nt, synthetic construct
  modified_base 1: mod_base = cm
  modified_base 2: mod_base = cm
  modified_base 3: mod_base = OTHER; note = 2'-O-methyladenosine
  modified_base 4: mod_base = gm
  modified_base 5: mod_base = gm
  modified_base 6: mod_base = OTHER; note = 2'-O-methyladenosine
  modified_base 7: mod_base = cm
  modified_base 8: mod_base = OTHER; note = 2'-O-methyladenosine
  modified_base 9: mod_base = OTHER; note = 2'-fluoroadenosine
  modified_base 10: mod_base = OTHER; note = 2'-fluorocytidine
  modified_base 11: mod_base = OTHER; note = 2'-fluorocytidine
  modified_base 12: mod_base = OTHER; note = 2'-O-methyladenosine
  modified_base 13: mod_base = cm
  modified_base 14: mod_base = um
  modified_base 15: mod_base = um
  modified_base 16: mod_base = um
  modified_base 17: mod_base = OTHER; note = 2'-O-methylinosine
  modified_base 18: mod_base = gm
  modified_base 19: mod_base = um
  modified_base 20: mod_base = gm
  modified_base 21: mod_base = OTHER; note = 2'-O-methyladenosine
  source 1..21: mol_type = other RNA
ccaggacaaccactttngtga

SEQ ID NO: 1473 - RNA, 21 nt, synthetic construct
  modified_base 1: mod_base = cm
  modified_base 2: mod_base = cm
  modified_base 3: mod_base = OTHER; note = 2'-O-methyladenosine
  modified_base 4: mod_base = cm
  modified_base 5: mod_base = OTHER; note = 2'-O-methyladenosine
  modified_base 6: mod_base = OTHER; note = 2'-O-methyladenosine
  modified_base 7: mod_base = cm
  modified_base 8: mod_base = cm
  modified_base 9: mod_base = OTHER; note = 2'-fluoroadenosine
  modified_base 10: mod_base = OTHER; note = 2'-fluoroguanosine
  modified_base 11: mod_base = OTHER; note = 2'-fluorocytidine
  modified_base 12: mod_base = OTHER; note = 2'-O-methyladenosine
  modified_base 13: mod_base = cm
  modified_base 14: mod_base = OTHER; note = 2'-O-methyladenosine
  modified_base 15: mod_base = OTHER; note = 2'-O-methyladenosine
  modified_base 16: mod_base = cm
  modified_base 17: mod_base = um
  modified_base 18: mod_base = um
  modified_base 19: mod_base = cm
  modified_base 20: mod_base = um
  modified_base 21: mod_base = OTHER; note = 2'-O-methyladenosine
  source 1..21: mol_type = other RNA
ccacaaccagcacaacttcta

SEQ ID NO: 1474 - RNA, 21 nt, synthetic construct
  modified_base 1: mod_base = gm
  modified_base 2: mod_base = OTHER; note = 2'-O-methyladenosine
  modified_base 3: mod_base = cm
  modified_base 4: mod_base = OTHER; note = 2'-O-methyladenosine
  modified_base 5: mod_base = OTHER; note = 2'-O-methyladenosine
  modified_base 6: mod_base = cm
  modified_base 7: mod_base = cm
  modified_base 8: mod_base = OTHER; note = 2'-O-methyladenosine
  modified_base 9: mod_base = OTHER; note = 2'-fluorocytidine
  modified_base 10: mod_base = OTHER; note = 2'-fluorouridine
  modified_base 11: mod_base = OTHER; note = 2'-fluorouridine
  modified_base 12: mod_base = um
  modified_base 13: mod_base = gm
  modified_base 14: mod_base = gm
  modified_base 15: mod_base = um
  modified_base 16: mod_base = gm
  modified_base 17: mod_base = OTHER; note = 2'-O-methyladenosine
  modified_base 18: mod_base = cm
  modified_base 19: mod_base = OTHER; note = 2'-O-methyladenosine
  modified_base 20: mod_base = OTHER; note = 2'-O-methyladenosine
  modified_base 21: mod_base = OTHER; note = 2'-O-methyladenosine
  source 1..21: mol_type = other RNA
gacaaccactttggtgacaaa

SEQ ID NO: 1475 - RNA, 21 nt, synthetic construct
  modified_base 1: mod_base = OTHER; note = 2'-O-methyladenosine
  modified_base 2: mod_base = cm
  modified_base 3: mod_base = cm
  modified_base 4: mod_base = um
  modified_base 5: mod_base = cm
  modified_base 6: mod_base = um
  modified_base 7: mod_base = gm
  modified_base 8: mod_base = cm
  modified_base 9: mod_base = OTHER; note = 2'-fluorouridine
  modified_base 10: mod_base = OTHER; note = 2'-fluorocytidine
  modified_base 11: mod_base = OTHER; note = 2'-fluorocytidine
  modified_base 12: mod_base = um
  modified_base 13: mod_base = OTHER; note = 2'-O-methyladenosine
  modified_base 14: mod_base = cm
  modified_base 15: mod_base = OTHER; note = 2'-O-methyladenosine
  modified_base 16: mod_base = OTHER; note = 2'-O-methyladenosine
  modified_base 17: mod_base = cm
  modified_base 18: mod_base = um
  modified_base 19: mod_base = OTHER; note = 2'-O-methyladenosine
  modified_base 20: mod_base = gm
  modified_base 21: mod_base = OTHER; note = 2'-O-methyladenosine
  source 1..21: mol_type = other RNA
acctctgctcctacaactaga

SEQ ID NO: 1476 - RNA, 21 nt, synthetic construct
  modified_base 1: mod_base = gm
  modified_base 2: mod_base = gm
  modified_base 3: mod_base = OTHER; note = 2'-O-methyladenosine
  modified_base 4: mod_base = cm
  modified_base 5: mod_base = gm
  modified_base 6: mod_base = um
  modified_base 7: mod_base = cm
  modified_base 8: mod_base = OTHER; note = 2'-O-methyladenosine
  modified_base 9: mod_base = OTHER; note = 2'-fluorouridine
  modified_base 10: mod_base = OTHER; note = 2'-fluorocytidine
  modified_base 11: mod_base = OTHER; note = 2'-fluorouridine
  modified_base 12: mod_base = OTHER; note = 2'-O-methyladenosine
  modified_base 13: mod_base = cm
  modified_base 14: mod_base = cm
  modified_base 15: mod_base = OTHER; note = 2'-O-methyladenosine
  modified_base 16: mod_base = cm
  modified_base 17: mod_base = OTHER; note = 2'-O-methyladenosine
  modified_base 18: mod_base = cm
  modified_base 19: mod_base = OTHER; note = 2'-O-methylinosine
  modified_base 20: mod_base = OTHER; note = 2'-O-methyladenosine
  modified_base 21: mod_base = OTHER; note = 2'-O-methyladenosine
  source 1..21: mol_type = other RNA
ggacgtcatctaccacacnaa

SEQ ID NO: 1477 - RNA, 21 nt, synthetic construct
  modified_base 1: mod_base = cm
  modified_base 2: mod_base = um
  modified_base 3: mod_base = gm
  modified_base 4: mod_base = cm
  modified_base 5: mod_base = um
  modified_base 6: mod_base = OTHER; note = 2'-O-methyladenosine
  modified_base 7: mod_base = cm
  modified_base 8: mod_base = OTHER; note = 2'-O-methyladenosine
  modified_base 9: mod_base = OTHER; note = 2'-fluoroadenosine
  modified_base 10: mod_base = OTHER; note = 2'-fluorocytidine
  modified_base 11: mod_base = OTHER; note = 2'-fluorouridine
  modified_base 12: mod_base = OTHER; note = 2'-O-methyladenosine
  modified_base 13: mod_base = um
  modified_base 14: mod_base = gm
  modified_base 15: mod_base = OTHER; note = 2'-O-methyladenosine
  modified_base 16: mod_base = OTHER; note = 2'-O-methylinosine
  modified_base 17: mod_base = OTHER; note = 2'-O-methyladenosine
  modified_base 18: mod_base = um
  modified_base 19: mod_base = cm
  modified_base 20: mod_base = cm
  modified_base 21: mod_base = OTHER; note = 2'-O-methyladenosine
  source 1..21: mol_type = other RNA
ctgctacaactatganatcca

SEQ ID NO: 1478 - RNA, 21 nt, synthetic construct
  modified_base 1: mod_base = OTHER; note = 2'-O-methyladenosine
  modified_base 2: mod_base = cm
  modified_base 3: mod_base = gm
  modified_base 4: mod_base = OTHER; note = 2'-O-methyladenosine
  modified_base 5: mod_base = gm
  modified_base 6: mod_base = OTHER; note = 2'-O-methyladenosine
  modified_base 7: mod_base = um
  modified_base 8: mod_base = cm
  modified_base 9: mod_base = OTHER; note = 2'-fluoroadenosine
  modified_base 10: mod_base = OTHER; note = 2'-fluorouridine
  modified_base 11: mod_base = OTHER; note = 2'-fluorocytidine
  modified_base 12: mod_base = um
  modified_base 13: mod_base = um
  modified_base 14: mod_base = cm
  modified_base 15: mod_base = OTHER; note = 2'-O-methyladenosine
  modified_base 16: mod_base = OTHER; note = 2'-O-methyladenosine
  modified_base 17: mod_base = cm
  modified_base 18: mod_base = OTHER; note = 2'-O-methyladenosine
  modified_base 19: mod_base = OTHER; note = 2'-O-methyladenosine
  modified_base 20: mod_base = cm
  modified_base 21: mod_base = OTHER; note = 2'-O-methyladenosine
  source 1..21: mol_type = other RNA
acgagatcatcttcaacaaca

SEQ ID NO: 1479 - RNA, 21 nt, synthetic construct
  modified_base 1: mod_base = cm
  modified_base 2: mod_base = gm
  modified_base 3: mod_base = OTHER; note = 2'-O-methyladenosine
  modified_base 4: mod_base = gm
  modified_base 5: mod_base = OTHER; note = 2'-O-methyladenosine
  modified_base 6: mod_base = um
  modified_base 7: mod_base = cm
  modified_base 8: mod_base = OTHER; note = 2'-O-methyladenosine
  modified_base 9: mod_base = OTHER; note = 2'-fluorouridine
  modified_base 10: mod_base = OTHER; note = 2'-fluorocytidine
  modified_base 11: mod_base = OTHER; note = 2'-fluorouridine
  modified_base 12: mod_base = um
  modified_base 13: mod_base = cm
  modified_base 14: mod_base = OTHER; note = 2'-O-methyladenosine
  modified_base 15: mod_base = OTHER; note = 2'-O-methyladenosine
  modified_base 16: mod_base = cm
  modified_base 17: mod_base = OTHER; note = 2'-O-methyladenosine
  modified_base 18: mod_base = OTHER; note = 2'-O-methyladenosine
  modified_base 19: mod_base = cm
  modified_base 20: mod_base = OTHER; note = 2'-O-methyladenosine
  modified_base 21: mod_base = OTHER; note = 2'-O-methyladenosine
  source 1..21: mol_type = other RNA
cgagatcatcttcaacaacaa

SEQ ID NO: 1480 - RNA, 21 nt, synthetic construct
  modified_base 1: mod_base = gm
  modified_base 2: mod_base = cm
  modified_base 3: mod_base = um
  modified_base 4: mod_base = gm
  modified_base 5: mod_base = OTHER; note = 2'-O-methyladenosine
  modified_base 6: mod_base = um
  modified_base 7: mod_base = OTHER; note = 2'-fluorouridine
  modified_base 8: mod_base = um
  modified_base 9: mod_base = OTHER; note = 2'-fluoroguanosine
  modified_base 10: mod_base = cm
  modified_base 11: mod_base = OTHER; note = 2'-fluorocytidine
  modified_base 12: mod_base = um
  modified_base 13: mod_base = gm
  modified_base 14: mod_base = OTHER; note = 2'-O-methyladenosine
  modified_base 15: mod_base = OTHER; note = 2'-O-methyladenosine
  modified_base 16: mod_base = cm
  modified_base 17: mod_base = OTHER; note = 2'-O-methyladenosine
  modified_base 18: mod_base = OTHER; note = 2'-O-methyladenosine
  modified_base 19: mod_base = gm
  modified_base 20: mod_base = OTHER; note = 2'-O-methyladenosine
  modified_base 21: mod_base = OTHER; note = 2'-O-methyladenosine
  source 1..21: mol_type = other RNA
gctgatttgcctgaacaagaa

SEQ ID NO: 1481 - RNA, 21 nt, synthetic construct
  modified_base 1: mod_base = gm
  modified_base 2: mod_base = cm
  modified_base 3: mod_base = um
  modified_base 4: mod_base = gm
  modified_base 5: mod_base = OTHER; note = 2'-O-methyladenosine
  modified_base 6: mod_base = um
  modified_base 7: mod_base = OTHER; note = 2'-fluorouridine
  modified_base 8: mod_base = um
  modified_base 9: mod_base = OTHER; note = 2'-fluoroguanosine
  modified_base 10: mod_base = cm
  modified_base 11: mod_base = OTHER; note = 2'-fluorocytidine
  modified_base 12: mod_base = um
  modified_base 13: mod_base = gm
  modified_base 14: mod_base = OTHER; note = 2 -O-methyl-2-aminoadenosine
  modified_base 15: mod_base = OTHER; note = 2'-O-methyladenosine
  modified_base 16: mod_base = cm
  modified_base 17: mod_base = OTHER; note = 2'-O-methyladenosine
  modified_base 18: mod_base = OTHER; note = 2'-O-methyladenosine
  modified_base 19: mod_base = gm
  modified_base 20: mod_base = OTHER; note = 2'-O-methyladenosine
  modified_base 21: mod_base = OTHER; note = 2'-O-methyladenosine
  source 1..21: mol_type = other RNA
gctgatttgcctgnacaagaa

SEQ ID NO: 1482 - RNA, 21 nt, synthetic construct
  modified_base 1: mod_base = gm
  modified_base 2: mod_base = gm
  modified_base 3: mod_base = cm
  modified_base 4: mod_base = um
  modified_base 5: mod_base = gm
  modified_base 6: mod_base = OTHER; note = 2'-O-methyladenosine
  modified_base 7: mod_base = OTHER; note = 2'-fluorouridine
  modified_base 8: mod_base = um
  modified_base 9: mod_base = OTHER; note = 2'-fluorouridine
  modified_base 10: mod_base = gm
  modified_base 11: mod_base = OTHER; note = 2'-fluorocytidine
  modified_base 12: mod_base = cm
  modified_base 13: mod_base = um
  modified_base 14: mod_base = gm
  modified_base 15: mod_base = OTHER; note = 2'-O-methyladenosine
  modified_base 16: mod_base = OTHER; note = 2'-O-methyladenosine
  modified_base 17: mod_base = cm
  modified_base 18: mod_base = OTHER; note = 2'-O-methyladenosine
  modified_base 19: mod_base = OTHER; note = 2'-O-methyladenosine
  modified_base 20: mod_base = gm
  modified_base 21: mod_base = OTHER; note = 2'-O-methyladenosine
  source 1..21: mol_type = other RNA
ggctgatttgcctgaacaaga

SEQ ID NO: 1483 - RNA, 21 nt, synthetic construct
  modified_base 1: mod_base = gm
  modified_base 1^2: mod_base = OTHER; note = phosphorothioate linkage
  modified_base 2: mod_base = OTHER; note = 2'-O-methyl-2-aminoadenosine
  modified_base 3: mod_base = OTHER; note = 2'-O-methyladenosine
  modified_base 4: mod_base = gm
  modified_base 5: mod_base = um
  modified_base 6: mod_base = OTHER; note = 2'-O-methyladenosine
  modified_base 7: mod_base = um
  modified_base 8: mod_base = gm
  modified_base 9: mod_base = OTHER; note = 2'-fluorocytidine
  modified_base 10: mod_base = OTHER; note = 2'-fluorouridine
  modified_base 11: mod_base = OTHER; note = 2'-fluorocytidine
  modified_base 12: mod_base = OTHER; note = 2'-O-methyladenosine
  modified_base 13: mod_base = gm
  modified_base 14: mod_base = um
  modified_base 15: mod_base = OTHER; note = 2'-O-methyladenosine
  modified_base 16: mod_base = cm
  modified_base 17: mod_base = um
  modified_base 18: mod_base = gm
  modified_base 19: mod_base = OTHER; note = 2'-O-methylinosine
  modified_base 20: mod_base = um
  modified_base 21: mod_base = OTHER; note = 2'-O-methyladenosine
  source 1..21: mol_type = other RNA
gnagtatgctcagtactgnta

SEQ ID NO: 1484 - RNA, 21 nt, synthetic construct
  modified_base 1: mod_base = OTHER; note = 2'-O-methyladenosine
  modified_base 1^2: mod_base = OTHER; note = phosphorothioate linkage
  modified_base 2: mod_base = cm
  modified_base 3: mod_base = cm
  modified_base 4: mod_base = cm
  modified_base 5: mod_base = OTHER; note = 2'-O-methyladenosine
  modified_base 6: mod_base = um
  modified_base 7: mod_base = gm
  modified_base 8: mod_base = um
  modified_base 9: mod_base = OTHER; note = 2'-fluoroguanosine
  modified_base 10: mod_base = OTHER; note = 2'-fluorocytidine
  modified_base 11: mod_base = OTHER; note = 2'-fluorouridine
  modified_base 12: mod_base = OTHER; note = 2'-O-methyladenosine
  modified_base 13: mod_base = cm
  modified_base 14: mod_base = OTHER; note = 2'-O-methyladenosine
  modified_base 15: mod_base = OTHER; note = 2'-O-methyladenosine
  modified_base 16: mod_base = cm
  modified_base 17: mod_base = um
  modified_base 18: mod_base = OTHER; note = 2'-O-methyladenosine
  modified_base 19: mod_base = um
  modified_base 20: mod_base = gm
  modified_base 21: mod_base = OTHER; note = 2'-O-methyladenosine
  source 1..21: mol_type = other RNA
acccatgtgctacaactatga

SEQ ID NO: 1485 - RNA, 21 nt, synthetic construct
  modified_base 1: mod_base = cm
  modified_base 1^2: mod_base = OTHER; note = phosphorothioate linkage
  modified_base 2: mod_base = cm
  modified_base 3: mod_base = OTHER; note = 2'-O-methyladenosine
  modified_base 4: mod_base = um
  modified_base 5: mod_base = OTHER; note = 2'-O-methyladenosine
  modified_base 6: mod_base = cm
  modified_base 7: mod_base = OTHER; note = 2'-O-methyladenosine
  modified_base 8: mod_base = gm
  modified_base 9: mod_base = OTHER; note = 2'-fluorocytidine
  modified_base 10: mod_base = OTHER; note = 2'-fluoroadenosine
  modified_base 11: mod_base = OTHER; note = 2'-fluoroguanosine
  modified_base 12: mod_base = um
  modified_base 13: mod_base = OTHER; note = 2'-O-methyladenosine
  modified_base 14: mod_base = cm
  modified_base 15: mod_base = OTHER; note = 2'-O-methyladenosine
  modified_base 16: mod_base = gm
  modified_base 17: mod_base = um
  modified_base 18: mod_base = um
  modified_base 19: mod_base = OTHER; note = 2'-O-methyladenosine
  modified_base 20: mod_base = cm
  modified_base 21: mod_base = OTHER; note = 2'-O-methyladenosine
  source 1..21: mol_type = other RNA
ccatacagcagtacagttaca

SEQ ID NO: 1486 - RNA, 21 nt, synthetic construct
  modified_base 1: mod_base = cm
  modified_base 1^2: mod_base = OTHER; note = phosphorothioate linkage
  modified_base 2: mod_base = um
  modified_base 3: mod_base = gm
  modified_base 4: mod_base = cm
  modified_base 5: mod_base = um
  modified_base 6: mod_base = OTHER; note = 2'-O-methyladenosine
  modified_base 7: mod_base = cm
  modified_base 8: mod_base = OTHER; note = 2'-O-methyladenosine
  modified_base 9: mod_base = OTHER; note = 2'-fluoroadenosine
  modified_base 10: mod_base = OTHER; note = 2'-fluorocytidine
  modified_base 11: mod_base = OTHER; note = 2'-fluorouridine
  modified_base 12: mod_base = OTHER; note = 2'-O-methyladenosine
  modified_base 13: mod_base = um
  modified_base 14: mod_base = gm
  modified_base 15: mod_base = OTHER; note = 2'-O-methyladenosine
  modified_base 16: mod_base = gm
  modified_base 17: mod_base = OTHER; note = 2'-O-methyladenosine
  modified_base 18: mod_base = um
  modified_base 19: mod_base = cm
  modified_base 20: mod_base = cm
  modified_base 21: mod_base = OTHER; note = 2'-O-methyladenosine
  source 1..21: mol_type = other RNA
ctgctacaactatgagatcca

SEQ ID NO: 1487 - RNA, 21 nt, synthetic construct
  modified_base 1: mod_base = cm
  modified_base 1^2: mod_base = OTHER; note = phosphorothioate linkage
  modified_base 2: mod_base = um
  modified_base 3: mod_base = gm
  modified_base 4: mod_base = cm
  modified_base 5: mod_base = um
  modified_base 6: mod_base = OTHER; note = 2'-O-methyladenosine
  modified_base 7: mod_base = cm
  modified_base 8: mod_base = OTHER; note = 2'-O-methyladenosine
  modified_base 9: mod_base = OTHER; note = 2'-fluoroadenosine
  modified_base 10: mod_base = OTHER; note = 2'-fluorocytidine
  modified_base 11: mod_base = OTHER; note = 2'-fluorouridine
  modified_base 12: mod_base = OTHER; note = 2'-O-methyladenosine
  modified_base 13: mod_base = um
  modified_base 14: mod_base = gm
  modified_base 15: mod_base = OTHER; note = 2'-O-methyladenosine
  modified_base 16: mod_base = OTHER; note = 2'-O-methylinosine
  modified_base 17: mod_base = OTHER; note = 2'-O-methyladenosine
  modified_base 18: mod_base = um
  modified_base 19: mod_base = cm
  modified_base 20: mod_base = cm
  modified_base 21: mod_base = OTHER; note = 2'-O-methyladenosine
  source 1..21: mol_type = other RNA
ctgctacaactatganatcca

SEQ ID NO: 1488 - RNA, 21 nt, synthetic construct
  modified_base 1: mod_base = cm
  modified_base 1^2: mod_base = OTHER; note = phosphorothioate linkage
  modified_base 2: mod_base = cm
  modified_base 3: mod_base = um
  modified_base 4: mod_base = gm
  modified_base 5: mod_base = gm
  modified_base 6: mod_base = OTHER; note = 2'-O-methyladenosine
  modified_base 7: mod_base = cm
  modified_base 8: mod_base = cm
  modified_base 9: mod_base = OTHER; note = 2'-fluoroadenosine
  modified_base 10: mod_base = OTHER; note = 2'-fluoroadenosine
  modified_base 11: mod_base = OTHER; note = 2'-fluoroguanosine
  modified_base 12: mod_base = um
  modified_base 13: mod_base = gm
  modified_base 14: mod_base = gm
  modified_base 15: mod_base = um
  modified_base 16: mod_base = um
  modified_base 17: mod_base = um
  modified_base 18: mod_base = gm
  modified_base 19: mod_base = OTHER; note = 2'-O-methyladenosine
  modified_base 20: mod_base = cm
  modified_base 21: mod_base = OTHER; note = 2'-O-methyladenosine
  source 1..21: mol_type = other RNA
cctggaccaagtggtttgaca

SEQ ID NO: 1489 - RNA, 21 nt, synthetic construct
  modified_base 1: mod_base = cm
  modified_base 1^2: mod_base = OTHER; note = phosphorothioate linkage
  modified_base 2: mod_base = cm
  modified_base 3: mod_base = um
  modified_base 4: mod_base = gm
  modified_base 5: mod_base = gm
  modified_base 6: mod_base = OTHER; note = 2'-O-methyladenosine
  modified_base 7: mod_base = cm
  modified_base 8: mod_base = cm
  modified_base 9: mod_base = OTHER; note = 2'-fluoroadenosine
  modified_base 10: mod_base = OTHER; note = 2'-fluoroadenosine
  modified_base 11: mod_base = OTHER; note = 2'-fluoroguanosine
  modified_base 12: mod_base = um
  modified_base 13: mod_base = gm
  modified_base 14: mod_base = gm
  modified_base 15: mod_base = um
  modified_base 16: mod_base = um
  modified_base 17: mod_base = um
  modified_base 18: mod_base = OTHER; note = 2'-O-methylinosine
  modified_base 19: mod_base = OTHER; note = 2'-O-methyladenosine
  modified_base 20: mod_base = cm
  modified_base 21: mod_base = OTHER; note = 2'-O-methyladenosine
  source 1..21: mol_type = other RNA
cctggaccaagtggtttnaca

SEQ ID NO: 1490 - RNA, 21 nt, synthetic construct
  modified_base 1: mod_base = cm
  modified_base 1^2: mod_base = OTHER; note = phosphorothioate linkage
  modified_base 2: mod_base = gm
  modified_base 3: mod_base = OTHER; note = 2'-O-methyladenosine
  modified_base 4: mod_base = gm
  modified_base 5: mod_base = OTHER; note = 2'-O-methyladenosine
  modified_base 6: mod_base = um
  modified_base 7: mod_base = cm
  modified_base 8: mod_base = OTHER; note = 2'-O-methyladenosine
  modified_base 9: mod_base = OTHER; note = 2'-fluorouridine
  modified_base 10: mod_base = OTHER; note = 2'-fluorocytidine
  modified_base 11: mod_base = OTHER; note = 2'-fluorouridine
  modified_base 12: mod_base = um
  modified_base 13: mod_base = cm
  modified_base 14: mod_base = OTHER; note = 2'-O-methyladenosine
  modified_base 15: mod_base = OTHER; note = 2'-O-methyladenosine
  modified_base 16: mod_base = cm
  modified_base 17: mod_base = OTHER; note = 2'-O-methyladenosine
  modified_base 18: mod_base = OTHER; note = 2'-O-methyladenosine
  modified_base 19: mod_base = cm
  modified_base 20: mod_base = OTHER; note = 2'-O-methyladenosine
  modified_base 21: mod_base = OTHER; note = 2'-O-methyladenosine
  source 1..21: mol_type = other RNA
cgagatcatcttcaacaacaa

SEQ ID NO: 1491 - RNA, 21 nt, synthetic construct
  modified_base 1: mod_base = gm
  modified_base 1^2: mod_base = OTHER; note = phosphorothioate linkage
  modified_base 2: mod_base = cm
  modified_base 3: mod_base = um
  modified_base 4: mod_base = gm
  modified_base 5: mod_base = um
  modified_base 6: mod_base = um
  modified_base 7: mod_base = cm
  modified_base 8: mod_base = um
  modified_base 9: mod_base = OTHER; note = 2'-fluoroguanosine
  modified_base 10: mod_base = OTHER; note = 2'-fluorocytidine
  modified_base 11: mod_base = OTHER; note = 2'-fluoroguanosine
  modified_base 12: mod_base = OTHER; note = 2'-O-methyladenosine
  modified_base 13: mod_base = cm
  modified_base 14: mod_base = um
  modified_base 15: mod_base = OTHER; note = 2'-O-methyladenosine
  modified_base 16: mod_base = cm
  modified_base 17: mod_base = um
  modified_base 18: mod_base = OTHER; note = 2'-O-methyladenosine
  modified_base 19: mod_base = cm
  modified_base 20: mod_base = OTHER; note = 2'-O-methyladenosine
  modified_base 21: mod_base = OTHER; note = 2'-O-methyladenosine
  source 1..21: mol_type = other RNA
gctgttctgcgactactacaa

SEQ ID NO: 1492 - RNA, 21 nt, synthetic construct
  modified_base 1: mod_base = gm
  modified_base 1^2: mod_base = OTHER; note = phosphorothioate linkage
  modified_base 2: mod_base = cm
  modified_base 3: mod_base = um
  modified_base 4: mod_base = gm
  modified_base 5: mod_base = um
  modified_base 6: mod_base = um
  modified_base 7: mod_base = cm
  modified_base 8: mod_base = um
  modified_base 9: mod_base = OTHER; note = 2'-fluoroguanosine
  modified_base 10: mod_base = OTHER; note = 2'-fluorouridine
  modified_base 11: mod_base = OTHER; note = 2'-fluoroguanosine
  modified_base 12: mod_base = OTHER; note = 2'-O-methyladenosine
  modified_base 13: mod_base = cm
  modified_base 14: mod_base = um
  modified_base 15: mod_base = OTHER; note = 2'-O-methyladenosine
  modified_base 16: mod_base = cm
  modified_base 17: mod_base = um
  modified_base 18: mod_base = OTHER; note = 2'-O-methyladenosine
  modified_base 19: mod_base = cm
  modified_base 20: mod_base = OTHER; note = 2'-O-methyladenosine
  modified_base 21: mod_base = OTHER; note = 2'-O-methyladenosine
  source 1..21: mol_type = other RNA
gctgttctgtgactactacaa

SEQ ID NO: 1493 - RNA, 21 nt, synthetic construct
  modified_base 1: mod_base = OTHER; note = 2'-O-methyladenosine
  modified_base 1^2: mod_base = OTHER; note = phosphorothioate linkage
  modified_base 2: mod_base = cm
  modified_base 3: mod_base = cm
  modified_base 4: mod_base = OTHER; note = 2'-O-methyladenosine
  modified_base 5: mod_base = gm
  modified_base 6: mod_base = OTHER; note = 2'-O-methyladenosine
  modified_base 7: mod_base = um
  modified_base 8: mod_base = cm
  modified_base 9: mod_base = OTHER; note = 2'-fluoroadenosine
  modified_base 10: mod_base = OTHER; note = 2'-fluorouridine
  modified_base 11: mod_base = OTHER; note = 2'-fluorocytidine
  modified_base 12: mod_base = um
  modified_base 13: mod_base = um
  modified_base 14: mod_base = cm
  modified_base 15: mod_base = OTHER; note = 2'-O-methyladenosine
  modified_base 16: mod_base = OTHER; note = 2'-O-methyladenosine
  modified_base 17: mod_base = cm
  modified_base 18: mod_base = OTHER; note = 2'-O-methyladenosine
  modified_base 19: mod_base = OTHER; note = 2'-O-methyladenosine
  modified_base 20: mod_base = cm
  modified_base 21: mod_base = OTHER; note = 2'-O-methyladenosine
  source 1..21: mol_type = other RNA
accagatcatcttcaacaaca

SEQ ID NO: 1494 - RNA, 21 nt, synthetic construct
  modified_base 1: mod_base = gm
  modified_base 1^2: mod_base = OTHER; note = phosphorothioate linkage
  modified_base 2: mod_base = gm
  modified_base 3: mod_base = cm
  modified_base 4: mod_base = um
  modified_base 5: mod_base = cm
  modified_base 6: mod_base = um
  modified_base 7: mod_base = gm
  modified_base 8: mod_base = um
  modified_base 9: mod_base = OTHER; note = 2'-fluoroguanosine
  modified_base 10: mod_base = OTHER; note = 2'-fluoroguanosine
  modified_base 11: mod_base = OTHER; note = 2'-fluorouridine
  modified_base 12: mod_base = OTHER; note = 2'-O-methyladenosine
  modified_base 13: mod_base = OTHER; note = 2'-O-methyladenosine
  modified_base 14: mod_base = cm
  modified_base 15: mod_base = um
  modified_base 16: mod_base = um
  modified_base 17: mod_base = cm
  modified_base 18: mod_base = OTHER; note = 2'-O-methyladenosine
  modified_base 19: mod_base = OTHER; note = 2'-O-methyladenosine
  modified_base 20: mod_base = cm
  modified_base 21: mod_base = OTHER; note = 2'-O-methyladenosine
  source 1..21: mol_type = other RNA
ggctctgtggtaacttcaaca

SEQ ID NO: 1495 - RNA, 21 nt, synthetic construct
  modified_base 1: mod_base = gm
  modified_base 1^2: mod_base = OTHER; note = phosphorothioate linkage
  modified_base 2: mod_base = OTHER; note = 2'-O-methyladenosine
  modified_base 3: mod_base = gm
  modified_base 4: mod_base = cm
  modified_base 5: mod_base = gm
  modified_base 6: mod_base = um
  modified_base 7: mod_base = gm
  modified_base 8: mod_base = gm
  modified_base 9: mod_base = OTHER; note = 2'-fluoroadenosine
  modified_base 10: mod_base = OTHER; note = 2'-fluoroguanosine
  modified_base 11: mod_base = OTHER; note = 2'-fluoroadenosine
  modified_base 12: mod_base = OTHER; note = 2'-O-methyladenosine
  modified_base 13: mod_base = um
  modified_base 14: mod_base = gm
  modified_base 15: mod_base = OTHER; note = 2'-O-methyladenosine
  modified_base 16: mod_base = OTHER; note = 2'-O-methyladenosine
  modified_base 17: mod_base = OTHER; note = 2'-O-methyladenosine
  modified_base 18: mod_base = OTHER; note = 2'-O-methyladenosine
  modified_base 19: mod_base = gm
  modified_base 20: mod_base = um
  modified_base 21: mod_base = OTHER; note = 2'-O-methyladenosine
  source 1..21: mol_type = other RNA
gagcgtggagaatgaaaagta

SEQ ID NO: 1496 - RNA, 21 nt, synthetic construct
  modified_base 1: mod_base = gm
  modified_base 1^2: mod_base = OTHER; note = phosphorothioate linkage
  modified_base 2: mod_base = gm
  modified_base 3: mod_base = gm
  modified_base 4: mod_base = OTHER; note = 2'-O-methyladenosine
  modified_base 5: mod_base = gm
  modified_base 6: mod_base = OTHER; note = 2'-O-methyladenosine
  modified_base 7: mod_base = OTHER; note = 2'-O-methyladenosine
  modified_base 8: mod_base = um
  modified_base 9: mod_base = OTHER; note = 2'-fluoroguanosine
  modified_base 10: mod_base = OTHER; note = 2'-fluoroadenosine
  modified_base 11: mod_base = OTHER; note = 2'-fluoroadenosine
  modified_base 12: mod_base = OTHER; note = 2'-O-methyladenosine
  modified_base 13: mod_base = OTHER; note = 2'-O-methyladenosine
  modified_base 14: mod_base = gm
  modified_base 15: mod_base = um
  modified_base 16: mod_base = OTHER; note = 2'-O-methyladenosine
  modified_base 17: mod_base = um
  modified_base 18: mod_base = gm
  modified_base 19: mod_base = cm
  modified_base 20: mod_base = um
  modified_base 21: mod_base = OTHER; note = 2'-O-methyladenosine
  source 1..21: mol_type = other RNA
gggagaatgaaaagtatgcta

SEQ ID NO: 1497 - RNA, 21 nt, synthetic construct
  modified_base 1: mod_base = cm
  modified_base 1^2: mod_base = OTHER; note = phosphorothioate linkage
  modified_base 2: mod_base = um
  modified_base 3: mod_base = um
  modified_base 4: mod_base = cm
  modified_base 5: mod_base = um
  modified_base 6: mod_base = cm
  modified_base 7: mod_base = gm
  modified_base 8: mod_base = OTHER; note = 2'-O-methyladenosine
  modified_base 9: mod_base = OTHER; note = 2'-fluoroadenosine
  modified_base 10: mod_base = OTHER; note = 2'-fluorocytidine
  modified_base 11: mod_base = OTHER; note = 2'-fluorouridine
  modified_base 12: mod_base = gm
  modified_base 13: mod_base = cm
  modified_base 14: mod_base = OTHER; note = 2'-O-methyladenosine
  modified_base 15: mod_base = um
  modified_base 16: mod_base = gm
  modified_base 17: mod_base = um
  modified_base 18: mod_base = OTHER; note = 2'-O-methyladenosine
  modified_base 19: mod_base = um
  modified_base 20: mod_base = gm
  modified_base 21: mod_base = OTHER; note = 2'-O-methyladenosine
  source 1..21: mol_type = other RNA
cttctcgaactgcatgtatga

SEQ ID NO: 1498 - RNA, 21 nt, synthetic construct
  modified_base 1: mod_base = gm
  modified_base 1^2: mod_base = OTHER; note = phosphorothioate linkage
  modified_base 2: mod_base = cm
  modified_base 3: mod_base = um
  modified_base 4: mod_base = cm
  modified_base 5: mod_base = gm
  modified_base 6: mod_base = OTHER; note = 2'-O-methyladenosine
  modified_base 7: mod_base = OTHER; note = 2'-O-methyladenosine
  modified_base 8: mod_base = cm
  modified_base 9: mod_base = OTHER; note = 2'-fluorouridine
  modified_base 10: mod_base = OTHER; note = 2'-fluoroguanosine
  modified_base 11: mod_base = OTHER; note = 2'-fluorocytidine
  modified_base 12: mod_base = OTHER; note = 2'-O-methyladenosine
  modified_base 13: mod_base = um
  modified_base 14: mod_base = gm
  modified_base 15: mod_base = um
  modified_base 16: mod_base = OTHER; note = 2'-O-methyladenosine
  modified_base 17: mod_base = um
  modified_base 18: mod_base = gm
  modified_base 19: mod_base = OTHER; note = 2'-O-methyladenosine
  modified_base 20: mod_base = cm
  modified_base 21: mod_base = OTHER; note = 2'-O-methyladenosine
  source 1..21: mol_type = other RNA
gctcgaactgcatgtatgaca

SEQ ID NO: 1499 - RNA, 21 nt, synthetic construct
  modified_base 1: mod_base = cm
  modified_base 1^2: mod_base = OTHER; note = phosphorothioate linkage
  modified_base 2: mod_base = um
  modified_base 3: mod_base = cm
  modified_base 4: mod_base = gm
  modified_base 5: mod_base = OTHER; note = 2'-O-methyladenosine
  modified_base 6: mod_base = OTHER; note = 2'-O-methyladenosine
  modified_base 7: mod_base = cm
  modified_base 8: mod_base = um
  modified_base 9: mod_base = OTHER; note = 2'-fluoroguanosine
  modified_base 10: mod_base = OTHER; note = 2'-fluorocytidine
  modified_base 11: mod_base = OTHER; note = 2'-fluoroadenosine
  modified_base 12: mod_base = um
  modified_base 13: mod_base = gm
  modified_base 14: mod_base = um
  modified_base 15: mod_base = OTHER; note = 2'-O-methyladenosine
  modified_base 16: mod_base = um
  modified_base 17: mod_base = gm
  modified_base 18: mod_base = OTHER; note = 2'-O-methyladenosine
  modified_base 19: mod_base = cm
  modified_base 20: mod_base = OTHER; note = 2'-O-methyladenosine
  modified_base 21: mod_base = OTHER; note = 2'-O-methyladenosine
  source 1..21: mol_type = other RNA
ctcgaactgcatgtatgacaa

SEQ ID NO: 1500 - RNA, 21 nt, synthetic construct
  modified_base 1: mod_base = cm
  modified_base 1^2: mod_base = OTHER; note = phosphorothioate linkage
  modified_base 2: mod_base = cm
  modified_base 3: mod_base = OTHER; note = 2'-O-methyladenosine
  modified_base 4: mod_base = cm
  modified_base 5: mod_base = um
  modified_base 6: mod_base = gm
  modified_base 7: mod_base = um
  modified_base 8: mod_base = um
  modified_base 9: mod_base = OTHER; note = 2'-fluorocytidine
  modified_base 10: mod_base = OTHER; note = 2'-fluorouridine
  modified_base 11: mod_base = OTHER; note = 2'-fluoroguanosine
  modified_base 12: mod_base = um
  modified_base 13: mod_base = gm
  modified_base 14: mod_base = OTHER; note = 2'-O-methyladenosine
  modified_base 15: mod_base = cm
  modified_base 16: mod_base = um
  modified_base 17: mod_base = OTHER; note = 2'-O-methyladenosine
  modified_base 18: mod_base = cm
  modified_base 19: mod_base = um
  modified_base 20: mod_base = OTHER; note = 2'-O-methyladenosine
  modified_base 21: mod_base = OTHER; note = 2'-O-methyladenosine
  source 1..21: mol_type = other RNA
ccactgttctgtgactactaa

SEQ ID NO: 1501 - RNA, 21 nt, synthetic construct
  modified_base 1: mod_base = cm
  modified_base 1^2: mod_base = OTHER; note = phosphorothioate linkage
  modified_base 2: mod_base = OTHER; note = 2'-O-methyladenosine
  modified_base 3: mod_base = cm
  modified_base 4: mod_base = um
  modified_base 5: mod_base = gm
  modified_base 6: mod_base = um
  modified_base 7: mod_base = um
  modified_base 8: mod_base = cm
  modified_base 9: mod_base = OTHER; note = 2'-fluorouridine
  modified_base 10: mod_base = OTHER; note = 2'-fluoroguanosine
  modified_base 11: mod_base = OTHER; note = 2'-fluorouridine
  modified_base 12: mod_base = gm
  modified_base 13: mod_base = OTHER; note = 2'-O-methyladenosine
  modified_base 14: mod_base = cm
  modified_base 15: mod_base = um
  modified_base 16: mod_base = OTHER; note = 2'-O-methyladenosine
  modified_base 17: mod_base = cm
  modified_base 18: mod_base = um
  modified_base 19: mod_base = OTHER; note = 2'-O-methyladenosine
  modified_base 20: mod_base = cm
  modified_base 21: mod_base = OTHER; note = 2'-O-methyladenosine
  source 1..21: mol_type = other RNA
cactgttctgtgactactaca

SEQ ID NO: 1502 - RNA, 21 nt, synthetic construct
  modified_base 1: mod_base = cm
  modified_base 1^2: mod_base = OTHER; note = phosphorothioate linkage
  modified_base 2: mod_base = cm
  modified_base 3: mod_base = um
  modified_base 4: mod_base = um
  modified_base 5: mod_base = cm
  modified_base 6: mod_base = um
  modified_base 7: mod_base = um
  modified_base 8: mod_base = cm
  modified_base 9: mod_base = OTHER; note = 2'-fluorouridine
  modified_base 10: mod_base = OTHER; note = 2'-fluorocytidine
  modified_base 11: mod_base = OTHER; note = 2'-fluoroguanosine
  modified_base 12: mod_base = OTHER; note = 2'-O-methyladenosine
  modified_base 13: mod_base = OTHER; note = 2'-O-methyladenosine
  modified_base 14: mod_base = cm
  modified_base 15: mod_base = um
  modified_base 16: mod_base = OTHER; note = 2'-O-methylinosine
  modified_base 17: mod_base = cm
  modified_base 18: mod_base = OTHER; note = 2'-O-methyladenosine
  modified_base 19: mod_base = um
  modified_base 20: mod_base = gm
  modified_base 21: mod_base = um
  source 1..21: mol_type = other RNA
ccttcttctcgaactncatgt

SEQ ID NO: 1503 - RNA, 21 nt, synthetic construct
  modified_base 1: mod_base = cm
  modified_base 1^2: mod_base = OTHER; note = phosphorothioate linkage
  modified_base 2: mod_base = OTHER; note = 2'-O-methyladenosine
  modified_base 3: mod_base = gm
  modified_base 4: mod_base = cm
  modified_base 5: mod_base = um
  modified_base 6: mod_base = um
  modified_base 7: mod_base = cm
  modified_base 8: mod_base = cm
  modified_base 9: mod_base = OTHER; note = 2'-fluoroadenosine
  modified_base 10: mod_base = OTHER; note = 2'-fluorocytidine
  modified_base 11: mod_base = OTHER; note = 2'-fluorouridine
  modified_base 12: mod_base = OTHER; note = 2'-O-methyladenosine
  modified_base 13: mod_base = cm
  modified_base 14: mod_base = OTHER; note = 2'-O-methyladenosine
  modified_base 15: mod_base = OTHER; note = 2'-O-methyladenosine
  modified_base 16: mod_base = OTHER; note = 2'-O-methylinosine
  modified_base 17: mod_base = OTHER; note = 2'-O-methyladenosine
  modified_base 18: mod_base = cm
  modified_base 19: mod_base = cm
  modified_base 20: mod_base = um
  modified_base 21: mod_base = um
  source 1..21: mol_type = other RNA
cagcttccactacaanacctt

SEQ ID NO: 1504 - RNA, 21 nt, synthetic construct
  modified_base 1: mod_base = cm
  modified_base 1^2: mod_base = OTHER; note = phosphorothioate linkage
  modified_base 2: mod_base = OTHER; note = 2'-O-methyladenosine
  modified_base 3: mod_base = gm
  modified_base 4: mod_base = cm
  modified_base 5: mod_base = um
  modified_base 6: mod_base = um
  modified_base 7: mod_base = cm
  modified_base 8: mod_base = cm
  modified_base 9: mod_base = OTHER; note = 2'-fluoroadenosine
  modified_base 10: mod_base = OTHER; note = 2'-fluorocytidine
  modified_base 11: mod_base = OTHER; note = 2'-fluorouridine
  modified_base 12: mod_base = OTHER; note = 2'-O-methyladenosine
  modified_base 13: mod_base = cm
  modified_base 14: mod_base = OTHER; note = 2'-O-methyladenosine
  modified_base 15: mod_base = OTHER; note = 2'-O-methyladenosine
  modified_base 16: mod_base = gm
  modified_base 17: mod_base = OTHER; note = 2'-O-methyladenosine
  modified_base 18: mod_base = cm
  modified_base 19: mod_base = cm
  modified_base 20: mod_base = um
  modified_base 21: mod_base = um
  source 1..21: mol_type = other RNA
cagcttccactacaagacctt

SEQ ID NO: 1505 - RNA, 21 nt, synthetic construct
  modified_base 1: mod_base = gm
  modified_base 1^2: mod_base = OTHER; note = phosphorothioate linkage
  modified_base 2: mod_base = OTHER; note = 2'-O-methyl-2-aminoadenosine
  modified_base 3: mod_base = OTHER; note = 2'-O-methyladenosine
  modified_base 4: mod_base = gm
  modified_base 5: mod_base = um
  modified_base 6: mod_base = OTHER; note = 2'-O-methyladenosine
  modified_base 7: mod_base = um
  modified_base 8: mod_base = gm
  modified_base 9: mod_base = OTHER; note = 2'-fluorocytidine
  modified_base 10: mod_base = OTHER; note = 2'-fluorouridine
  modified_base 11: mod_base = OTHER; note = 2'-fluorocytidine
  modified_base 12: mod_base = OTHER; note = 2'-O-methyladenosine
  modified_base 13: mod_base = gm
  modified_base 14: mod_base = cm
  modified_base 15: mod_base = OTHER; note = 2'-O-methyladenosine
  modified_base 16: mod_base = cm
  modified_base 17: mod_base = um
  modified_base 18: mod_base = gm
  modified_base 19: mod_base = OTHER; note = 2'-O-methylinosine
  modified_base 20: mod_base = um
  modified_base 21: mod_base = OTHER; note = 2'-O-methyladenosine
  source 1..21: mol_type = other RNA
gnagtatgctcagcactgnta

SEQ ID NO: 1506 - RNA, 21 nt, synthetic construct
  modified_base 1: mod_base = gm
  modified_base 1^2: mod_base = OTHER; note = phosphorothioate linkage
  modified_base 2: mod_base = cm
  modified_base 3: mod_base = cm
  modified_base 4: mod_base = um
  modified_base 5: mod_base = um
  modified_base 6: mod_base = cm
  modified_base 7: mod_base = um
  modified_base 8: mod_base = um
  modified_base 9: mod_base = OTHER; note = 2'-fluorocytidine
  modified_base 10: mod_base = OTHER; note = 2'-fluoroadenosine
  modified_base 11: mod_base = OTHER; note = 2'-fluoroadenosine
  modified_base 12: mod_base = cm
  modified_base 13: mod_base = OTHER; note = 2'-O-methyladenosine
  modified_base 14: mod_base = cm
  modified_base 15: mod_base = cm
  modified_base 16: mod_base = um
  modified_base 17: mod_base = um
  modified_base 18: mod_base = cm
  modified_base 19: mod_base = OTHER; note = 2'-O-methyladenosine
  modified_base 20: mod_base = OTHER; note = 2'-O-methyladenosine
  modified_base 21: mod_base = OTHER; note = 2'-O-methyladenosine
  source 1..21: mol_type = other RNA
gccttcttcaacaccttcaaa

SEQ ID NO: 1507 - RNA, 21 nt, synthetic construct
  modified_base 1: mod_base = gm
  modified_base 1^2: mod_base = OTHER; note = phosphorothioate linkage
  modified_base 2: mod_base = cm
  modified_base 3: mod_base = cm
  modified_base 4: mod_base = um
  modified_base 5: mod_base = um
  modified_base 6: mod_base = cm
  modified_base 7: mod_base = um
  modified_base 8: mod_base = um
  modified_base 9: mod_base = OTHER; note = 2'-fluorocytidine
  modified_base 10: mod_base = OTHER; note = 2'-fluoroadenosine
  modified_base 11: mod_base = OTHER; note = 2'-fluoroadenosine
  modified_base 12: mod_base = cm
  modified_base 13: mod_base = OTHER; note = 2'-O-methyladenosine
  modified_base 14: mod_base = um
  modified_base 15: mod_base = cm
  modified_base 16: mod_base = um
  modified_base 17: mod_base = um
  modified_base 18: mod_base = cm
  modified_base 19: mod_base = OTHER; note = 2'-O-methyladenosine
  modified_base 20: mod_base = OTHER; note = 2'-O-methyladenosine
  modified_base 21: mod_base = OTHER; note = 2'-O-methyladenosine
  source 1..21: mol_type = other RNA
gccttcttcaacatcttcaaa

SEQ ID NO: 1508 - RNA, 21 nt, synthetic construct
  modified_base 1: mod_base = gm
  modified_base 1^2: mod_base = OTHER; note = phosphorothioate linkage
  modified_base 2: mod_base = cm
  modified_base 3: mod_base = cm
  modified_base 4: mod_base = um
  modified_base 5: mod_base = um
  modified_base 6: mod_base = cm
  modified_base 7: mod_base = um
  modified_base 8: mod_base = um
  modified_base 9: mod_base = OTHER; note = 2'-fluorocytidine
  modified_base 10: mod_base = OTHER; note = 2'-fluoroadenosine
  modified_base 11: mod_base = OTHER; note = 2'-fluoroadenosine
  modified_base 12: mod_base = cm
  modified_base 13: mod_base = OTHER; note = 2'-O-methyladenosine
  modified_base 14: mod_base = cm
  modified_base 15: mod_base = um
  modified_base 16: mod_base = um
  modified_base 17: mod_base = um
  modified_base 18: mod_base = cm
  modified_base 19: mod_base = OTHER; note = 2'-O-methyladenosine
  modified_base 20: mod_base = OTHER; note = 2'-O-methyladenosine
  modified_base 21: mod_base = OTHER; note = 2'-O-methyladenosine
  source 1..21: mol_type = other RNA
gccttcttcaacactttcaaa

SEQ ID NO: 1509 - RNA, 21 nt, synthetic construct
  modified_base 1: mod_base = cm
  modified_base 1^2: mod_base = OTHER; note = phosphorothioate linkage
  modified_base 2: mod_base = cm
  modified_base 3: mod_base = OTHER; note = 2'-O-methyladenosine
  modified_base 4: mod_base = cm
  modified_base 5: mod_base = cm
  modified_base 6: mod_base = cm
  modified_base 7: mod_base = OTHER; note = 2'-O-methyladenosine
  modified_base 8: mod_base = um
  modified_base 9: mod_base = OTHER; note = 2'-fluoroguanosine
  modified_base 10: mod_base = OTHER; note = 2'-fluorouridine
  modified_base 11: mod_base = OTHER; note = 2'-fluoroguanosine
  modified_base 12: mod_base = cm
  modified_base 13: mod_base = um
  modified_base 14: mod_base = OTHER; note = 2'-O-methyladenosine
  modified_base 15: mod_base = cm
  modified_base 16: mod_base = OTHER; note = 2'-O-methyladenosine
  modified_base 17: mod_base = OTHER; note = 2'-O-methyladenosine
  modified_base 18: mod_base = cm
  modified_base 19: mod_base = um
  modified_base 20: mod_base = OTHER; note = 2'-O-methyladenosine
  modified_base 21: mod_base = um
  source 1..21: mol_type = other RNA
ccacccatgtgctacaactat

SEQ ID NO: 1510 - RNA, 21 nt, synthetic construct
  modified_base 1: mod_base = cm
  modified_base 1^2: mod_base = OTHER; note = phosphorothioate linkage
  modified_base 2: mod_base = um
  modified_base 3: mod_base = gm
  modified_base 4: mod_base = cm
  modified_base 5: mod_base = um
  modified_base 6: mod_base = OTHER; note = 2'-O-methyladenosine
  modified_base 7: mod_base = OTHER; note = 2'-fluorocytidine
  modified_base 8: mod_base = OTHER; note = 2'-O-methyladenosine
  modified_base 9: mod_base = OTHER; note = 2'-fluoroadenosine
  modified_base 10: mod_base = cm
  modified_base 11: mod_base = OTHER; note = 2'-fluorouridine
  modified_base 12: mod_base = OTHER; note = 2'-O-methyladenosine
  modified_base 13: mod_base = um
  modified_base 14: mod_base = gm
  modified_base 15: mod_base = OTHER; note = 2'-O-methyladenosine
  modified_base 16: mod_base = OTHER; note = 2'-O-methylinosine
  modified_base 17: mod_base = OTHER; note = 2'-O-methyladenosine
  modified_base 18: mod_base = um
  modified_base 19: mod_base = cm
  modified_base 20: mod_base = cm
  modified_base 21: mod_base = OTHER; note = 2'-O-methyladenosine
  source 1..21: mol_type = other RNA
ctgctacaactatganatcca

SEQ ID NO: 1511 - RNA, 21 nt, synthetic construct
  modified_base 1: mod_base = cm
  modified_base 1^2: mod_base = OTHER; note = phosphorothioate linkage
  modified_base 2: mod_base = gm
  modified_base 3: mod_base = OTHER; note = 2'-O-methyladenosine
  modified_base 4: mod_base = gm
  modified_base 5: mod_base = OTHER; note = 2'-O-methyladenosine
  modified_base 6: mod_base = um
  modified_base 7: mod_base = OTHER; note = 2'-fluorocytidine
  modified_base 8: mod_base = OTHER; note = 2'-O-methyladenosine
  modified_base 9: mod_base = OTHER; note = 2'-fluorouridine
  modified_base 10: mod_base = cm
  modified_base 11: mod_base = OTHER; note = 2'-fluorouridine
  modified_base 12: mod_base = um
  modified_base 13: mod_base = cm
  modified_base 14: mod_base = OTHER; note = 2'-O-methyladenosine
  modified_base 15: mod_base = OTHER; note = 2'-O-methyladenosine
  modified_base 16: mod_base = cm
  modified_base 17: mod_base = OTHER; note = 2'-O-methyladenosine
  modified_base 18: mod_base = OTHER; note = 2'-O-methyladenosine
  modified_base 19: mod_base = cm
  modified_base 20: mod_base = OTHER; note = 2'-O-methyladenosine
  modified_base 21: mod_base = OTHER; note = 2'-O-methyladenosine
  source 1..21: mol_type = other RNA
cgagatcatcttcaacaacaa

SEQ ID NO: 1512 - RNA, 21 nt, synthetic construct
  modified_base 1: mod_base = cm
  modified_base 1^2: mod_base = OTHER; note = phosphorothioate linkage
  modified_base 2: mod_base = gm
  modified_base 3: mod_base = OTHER; note = 2'-O-methyladenosine
  modified_base 4: mod_base = gm
  modified_base 5: mod_base = OTHER; note = 2'-O-methyladenosine
  modified_base 6: mod_base = um
  modified_base 7: mod_base = cm
  modified_base 8: mod_base = OTHER; note = 2'-O-methyladenosine
  modified_base 9: mod_base = OTHER; note = 2'-fluorouridine
  modified_base 10: mod_base = OTHER; note = 2'-fluorocytidine
  modified_base 11: mod_base = OTHER; note = 2'-fluorouridine
  modified_base 12: mod_base = um
  modified_base 13: mod_base = cm
  modified_base 14: mod_base = OTHER; note = 2'-O-methyl-2-aminoadenosine
  modified_base 15: mod_base = OTHER; note = 2'-O-methyladenosine
  modified_base 16: mod_base = cm
  modified_base 17: mod_base = OTHER; note = 2'-O-methyladenosine
  modified_base 18: mod_base = OTHER; note = 2'-O-methyladenosine
  modified_base 19: mod_base = cm
  modified_base 20: mod_base = OTHER; note = 2'-O-methyladenosine
  modified_base 21: mod_base = OTHER; note = 2'-O-methyladenosine
  source 1..21: mol_type = other RNA
cgagatcatcttcnacaacaa

SEQ ID NO: 1513 - RNA, 21 nt, synthetic construct
  modified_base 1: mod_base = gm
  modified_base 1^2: mod_base = OTHER; note = phosphorothioate linkage
  modified_base 2: mod_base = cm
  modified_base 3: mod_base = um
  modified_base 4: mod_base = gm
  modified_base 5: mod_base = OTHER; note = 2'-O-methyladenosine
  modified_base 6: mod_base = um
  modified_base 7: mod_base = OTHER; note = 2'-fluorouridine
  modified_base 8: mod_base = um
  modified_base 9: mod_base = OTHER; note = 2'-fluoroguanosine
  modified_base 10: mod_base = cm
  modified_base 11: mod_base = OTHER; note = 2'-fluorocytidine
  modified_base 12: mod_base = um
  modified_base 13: mod_base = gm
  modified_base 14: mod_base = OTHER; note = 2'-O-methyladenosine
  modified_base 15: mod_base = OTHER; note = 2'-O-methyladenosine
  modified_base 16: mod_base = cm
  modified_base 17: mod_base = OTHER; note = 2'-O-methyladenosine
  modified_base 18: mod_base = OTHER; note = 2'-O-methyladenosine
  modified_base 19: mod_base = gm
  modified_base 20: mod_base = OTHER; note = 2'-O-methyladenosine
  modified_base 21: mod_base = OTHER; note = 2'-O-methyladenosine
  source 1..21: mol_type = other RNA
gctgatttgcctgaacaagaa

SEQ ID NO: 1514 - RNA, 21 nt, synthetic construct
  modified_base 1: mod_base = gm
  modified_base 1^2: mod_base = OTHER; note = phosphorothioate linkage
  modified_base 2: mod_base = cm
  modified_base 3: mod_base = um
  modified_base 4: mod_base = gm
  modified_base 5: mod_base = um
  modified_base 6: mod_base = um
  modified_base 7: mod_base = cm
  modified_base 8: mod_base = um
  modified_base 9: mod_base = OTHER; note = 2'-fluoroguanosine
  modified_base 10: mod_base = OTHER; note = 2'-fluorocytidine
  modified_base 11: mod_base = OTHER; note = 2'-fluoroguanosine
  modified_base 12: mod_base = OTHER; note = 2'-O-methyladenosine
  modified_base 13: mod_base = cm
  modified_base 14: mod_base = um
  modified_base 15: mod_base = OTHER; note = 2'-O-methyladenosine
  modified_base 16: mod_base = cm
  modified_base 17: mod_base = um
  modified_base 18: mod_base = OTHER; note = 2'-O-methyladenosine
  modified_base 19: mod_base = cm
  modified_base 20: mod_base = OTHER; note = 2'-O-methyladenosine
  modified_base 21: mod_base = OTHER; note = 2'-O-methyladenosine
  source 1..21: mol_type = other RNA
gctgttctgcgactactacaa

SEQ ID NO: 1515 - RNA, 22 nt, synthetic construct
  modified_base 1: mod_base = gm
  modified_base 1^2: mod_base = OTHER; note = phosphorothioate linkage
  modified_base 2: mod_base = cm
  modified_base 3: mod_base = um
  modified_base 4: mod_base = gm
  modified_base 5: mod_base = gm
  modified_base 6: mod_base = um
  modified_base 7: mod_base = um
  modified_base 8: mod_base = cm
  modified_base 9: mod_base = um
  modified_base 10: mod_base = OTHER; note = 2'-fluoroguanosine
  modified_base 11: mod_base = OTHER; note = 2'-fluorocytidine
  modified_base 12: mod_base = OTHER; note = 2'-fluoroguanosine
  modified_base 13: mod_base = OTHER; note = 2'-O-methyladenosine
  modified_base 14: mod_base = cm
  modified_base 15: mod_base = um
  modified_base 16: mod_base = OTHER; note = 2'-O-methyladenosine
  modified_base 17: mod_base = cm
  modified_base 18: mod_base = um
  modified_base 19: mod_base = OTHER; note = 2'-O-methyladenosine
  modified_base 20: mod_base = cm
  modified_base 21: mod_base = OTHER; note = 2'-O-methyladenosine
  modified_base 22: mod_base = OTHER; note = 2'-O-methyladenosine
  source 1..22: mol_type = other RNA
gctggttctgcgactactacaa

SEQ ID NO: 1516 - RNA, 20 nt, synthetic construct
  modified_base 1: mod_base = gm
  modified_base 1^2: mod_base = OTHER; note = phosphorothioate linkage
  modified_base 2: mod_base = cm
  modified_base 3: mod_base = gm
  modified_base 4: mod_base = um
  modified_base 5: mod_base = um
  modified_base 6: mod_base = cm
  modified_base 7: mod_base = um
  modified_base 8: mod_base = OTHER; note = 2'-fluoroguanosine
  modified_base 9: mod_base = OTHER; note = 2'-fluorocytidine
  modified_base 10: mod_base = OTHER; note = 2'-fluoroguanosine
  modified_base 11: mod_base = OTHER; note = 2'-O-methyladenosine
  modified_base 12: mod_base = cm
  modified_base 13: mod_base = um
  modified_base 14: mod_base = OTHER; note = 2'-O-methyladenosine
  modified_base 15: mod_base = cm
  modified_base 16: mod_base = um
  modified_base 17: mod_base = OTHER; note = 2'-O-methyladenosine
  modified_base 18: mod_base = cm
  modified_base 19: mod_base = OTHER; note = 2'-O-methyladenosine
  modified_base 20: mod_base = OTHER; note = 2'-O-methyladenosine
  source 1..20: mol_type = other RNA
gcgttctgcgactactacaa

SEQ ID NO: 1517 - RNA, 21 nt, synthetic construct
  source 1..21: mol_type = other RNA
tttgatggccttggagcaggt

SEQ ID NO: 1518 - RNA, 21 nt, synthetic construct
  source 1..21: mol_type = other RNA
aatcttgatggccttggagca

SEQ ID NO: 1519 - RNA, 21 nt, synthetic construct
  source 1..21: mol_type = other RNA
tttgaactcggggctgaggtt

SEQ ID NO: 1520 - RNA, 21 nt, synthetic construct
  source 1..21: mol_type = other RNA
tgatgctgcactgcttctggg

SEQ ID NO: 1521 - RNA, 21 nt, synthetic construct
  source 1..21: mol_type = other RNA
ttagtcgcagaacagagggca

SEQ ID NO: 1522 - RNA, 21 nt, synthetic construct
  source 1..21: mol_type = other RNA
agtagtcgcagaacagagggc

SEQ ID NO: 1523 - RNA, 21 nt, synthetic construct
  source 1..21: mol_type = other RNA
ttagtagtcgcagaacagagg

SEQ ID NO: 1524 - RNA, 21 nt, synthetic construct
  source 1..21: mol_type = other RNA
tgtagtagtcgcagaacagag

SEQ ID NO: 1525 - RNA, 21 nt, synthetic construct
  source 1..21: mol_type = other RNA
ttgtagtagtcgcagaacagc

SEQ ID NO: 1526 - RNA, 21 nt, synthetic construct
  source 1..21: mol_type = other RNA
atagttgtagcagatgggtgg

SEQ ID NO: 1527 - RNA, 21 nt, synthetic construct
  source 1..21: mol_type = other RNA
ttccacgtcgaaccactttgc

SEQ ID NO: 1528 - RNA, 21 nt, synthetic construct
  source 1..21: mol_type = other RNA
taagtccacgtcgaaccactc

SEQ ID NO: 1529 - RNA, 21 nt, synthetic construct
  source 1..21: mol_type = other RNA
tggaagtccacgtcgaaccac

SEQ ID NO: 1530 - RNA, 21 nt, synthetic construct
  source 1..21: mol_type = other RNA
aaggtcttgtagtggaagctg

SEQ ID NO: 1531 - RNA, 21 nt, synthetic construct
  source 1..21: mol_type = other RNA
taccagtgctgagcatacttc

SEQ ID NO: 1532 - RNA, 21 nt, synthetic construct
  source 1..21: mol_type = other RNA
tttgaaggtgttgaagaaggc

SEQ ID NO: 1533 - RNA, 21 nt, synthetic construct
  source 1..21: mol_type = other RNA
agatgctggtcttcttgtccc

SEQ ID NO: 1534 - RNA, 21 nt, synthetic construct
  source 1..21: mol_type = other RNA
tgttgatgaagatgctggtcc

SEQ ID NO: 1535 - RNA, 21 nt, synthetic construct
  source 1..21: mol_type = other RNA
ttcttgttcaggcaaatcagc

SEQ ID NO: 1536 - RNA, 21 nt, synthetic construct
  source 1..21: mol_type = other RNA
atgttgttgtaggtttccttg

SEQ ID NO: 1537 - RNA, 21 nt, synthetic construct
  source 1..21: mol_type = other RNA
atgatgttgttgtaggtttcc

SEQ ID NO: 1538 - RNA, 21 nt, synthetic construct
  source 1..21: mol_type = other RNA
ttgatgaagatgctggtcttc

SEQ ID NO: 1539 - RNA, 21 nt, synthetic construct
  source 1..21: mol_type = other RNA
tgatctggtagttgtagcagc

SEQ ID NO: 1540 - RNA, 21 nt, synthetic construct
  source 1..21: mol_type = other RNA
tcctgatctggtagttgtagc

SEQ ID NO: 1541 - RNA, 21 nt, synthetic construct
  source 1..21: mol_type = other RNA
tagttgtagcagatgggtggg

SEQ ID NO: 1542 - RNA, 21 nt, synthetic construct
  source 1..21: mol_type = other RNA
tcaacactggatgcggatctc

SEQ ID NO: 1543 - RNA, 21 nt, synthetic construct
  source 1..21: mol_type = other RNA
ttgttcgatgctcacctctgg

SEQ ID NO: 1544 - RNA, 21 nt, synthetic construct
  source 1..21: mol_type = other RNA
tatcttgaagggtccctgctg

SEQ ID NO: 1545 - RNA, 21 nt, synthetic construct
  source 1..21: mol_type = other RNA
tcgtagttgaggcacatcttg

SEQ ID NO: 1546 - RNA, 21 nt, synthetic construct
  source 1..21: mol_type = other RNA
tctcgtagttgaggcacatcc

SEQ ID NO: 1547 - RNA, 21 nt, synthetic construct
  source 1..21: mol_type = other RNA
tttcaggcaggtctcgctgtc

SEQ ID NO: 1548 - RNA, 21 nt, synthetic construct
  source 1..21: mol_type = other RNA
ttctgaagatggtgacgttgg

SEQ ID NO: 1549 - RNA, 21 nt, synthetic construct
  source 1..21: mol_type = other RNA
tgtctgaagatggtgacgttg

SEQ ID NO: 1550 - RNA, 21 nt, synthetic construct
  source 1..21: mol_type = other RNA
tggaagtcatcggcctggatg

SEQ ID NO: 1551 - RNA, 21 nt, synthetic construct
  source 1..21: mol_type = other RNA
tgcagttcgagtagtaggttc

SEQ ID NO: 1552 - RNA, 21 nt, synthetic construct
  source 1..21: mol_type = other RNA
tttggagcaggtggtccctgt

SEQ ID NO: 1553 - RNA, 21 nt, synthetic construct
  source 1..21: mol_type = other RNA
tcttgatggccttggagcagg

SEQ ID NO: 1554 - RNA, 21 nt, synthetic construct
  source 1..21: mol_type = other RNA
ttgtcatcgtggttccacatg

SEQ ID NO: 1555 - RNA, 21 nt, synthetic construct
  source 1..21: mol_type = other RNA
acagaagcagaggtcttgcct

SEQ ID NO: 1556 - RNA, 21 nt, synthetic construct
  source 1..21: mol_type = other RNA
tcagttggtgcagtctgtgga

SEQ ID NO: 1557 - RNA, 21 nt, synthetic construct
  source 1..21: mol_type = other RNA
tcagtacagtgaaggcactgc

SEQ ID NO: 1558 - RNA, 21 nt, synthetic construct
  source 1..21: mol_type = other RNA
tgctgttgaagttcccacagc

SEQ ID NO: 1559 - RNA, 21 nt, synthetic construct
  source 1..21: mol_type = other RNA
tgatgctgttgaagttcccac

SEQ ID NO: 1560 - RNA, 21 nt, synthetic construct
  source 1..21: mol_type = other RNA
tggtcttgaaggtgttgaagc

SEQ ID NO: 1561 - RNA, 21 nt, synthetic construct
  source 1..21: mol_type = other RNA
aagctgttcctgatgttgggg

SEQ ID NO: 1562 - RNA, 21 nt, synthetic construct
  source 1..21: mol_type = other RNA
acatgcagttcgagtagtagg

SEQ ID NO: 1563 - RNA, 21 nt, synthetic construct
  source 1..21: mol_type = other RNA
taagccaacactgcaggtgac

SEQ ID NO: 1564 - RNA, 21 nt, synthetic construct
  source 1..21: mol_type = other RNA
ttgtaacaggtcatgtccagc

SEQ ID NO: 1565 - RNA, 21 nt, synthetic construct
  source 1..21: mol_type = other RNA
tcgttgaagctgtagctctgc

SEQ ID NO: 1566 - RNA, 21 nt, synthetic construct
  source 1..21: mol_type = other RNA
tggatctcatagttgtagcag

SEQ ID NO: 1567 - RNA, 21 nt, synthetic construct
  source 1..21: mol_type = other RNA
tgtcaaaccacttggtccagg

SEQ ID NO: 1568 - RNA, 21 nt, synthetic construct
  source 1..21: mol_type = other RNA
ttgttgttgaagatgatctcg

SEQ ID NO: 1569 - RNA, 21 nt, synthetic construct
  source 1..21: mol_type = other RNA
tagtacagtgaaggcactgct

SEQ ID NO: 1570 - RNA, 21 nt, synthetic construct
  source 1..21: mol_type = other RNA
ttcgaagctgttcctgatgtc

SEQ ID NO: 1571 - RNA, 21 nt, synthetic construct
  source 1..21: mol_type = other RNA
tcttgttcaggcaaatcagcc

SEQ ID NO: 1572 - RNA, 21 nt, synthetic construct
  source 1..21: mol_type = other RNA
tcaccaaagtggttgtcctgg

SEQ ID NO: 1573 - RNA, 21 nt, synthetic construct
  source 1..21: mol_type = other RNA
tagcagaggttgttctggttg

SEQ ID NO: 1574 - RNA, 21 nt, synthetic construct
  source 1..21: mol_type = other RNA
tagattgtgctggttgtagcg

SEQ ID NO: 1575 - RNA, 21 nt, synthetic construct
  source 1..21: mol_type = other RNA
tagaagttgtgctggttgtgg

SEQ ID NO: 1576 - RNA, 21 nt, synthetic construct
  source 1..21: mol_type = other RNA
tttgtcaccaaagtggttgtc

SEQ ID NO: 1577 - RNA, 21 nt, synthetic construct
  source 1..21: mol_type = other RNA
tagaggttgtgttggttgtag

SEQ ID NO: 1578 - RNA, 21 nt, synthetic construct
  source 1..21: mol_type = other RNA
tctagttgtaggagcagaggt

SEQ ID NO: 1579 - RNA, 21 nt, synthetic construct
  source 1..21: mol_type = other RNA
ttgtagtagtcacagaacagc

SEQ ID NO: 1580 - RNA, 21 nt, synthetic construct
  source 1..21: mol_type = other RNA
tcatagttgtagcacatgggt

SEQ ID NO: 1581 - RNA, 21 nt, synthetic construct
  source 1..21: mol_type = other RNA
tgttgttgaagatgatctggt

SEQ ID NO: 1582 - RNA, 21 nt, synthetic construct
  source 1..21: mol_type = other RNA
tgttgaagttaccacagagcc

SEQ ID NO: 1583 - RNA, 21 nt, synthetic construct
  source 1..21: mol_type = other RNA
tacttttcattctccacgctc

SEQ ID NO: 1584 - RNA, 21 nt, synthetic construct
  source 1..21: mol_type = other RNA
tagcatacttttcattctccc

SEQ ID NO: 1585 - RNA, 21 nt, synthetic construct
  source 1..21: mol_type = other RNA
tcatacatgcagttcgagaag

SEQ ID NO: 1586 - RNA, 21 nt, synthetic construct
  source 1..21: mol_type = other RNA
tgtcatacatgcagttcgagc

SEQ ID NO: 1587 - RNA, 21 nt, synthetic construct
  source 1..21: mol_type = other RNA
ttgtcatacatgcagttcgag

SEQ ID NO: 1588 - RNA, 21 nt, synthetic construct
  source 1..21: mol_type = other RNA
ttagtagtcacagaacagtgg

SEQ ID NO: 1589 - RNA, 21 nt, synthetic construct
  source 1..21: mol_type = other RNA
tgtagtagtcacagaacagtg

SEQ ID NO: 1590 - RNA, 21 nt, synthetic construct
  modified_base 12: mod_base = i
  source 1..21: mol_type = other RNA
ttgtagtagtcncagaacagc

SEQ ID NO: 1591 - RNA, 21 nt, synthetic construct
  source 1..21: mol_type = other RNA
acatgcagttcgagaagaagg

SEQ ID NO: 1592 - RNA, 21 nt, synthetic construct
  source 1..21: mol_type = other RNA
atagttgtagcacatgggtgg

SEQ ID NO: 1593 - RNA, 21 nt, synthetic construct
  source 1..21: mol_type = other RNA
tgtagtagtcacagaacagtc

SEQ ID NO: 1594 - RNA, 21 nt, synthetic construct
  source 1..21: mol_type = other RNA
tggttcaggaacacttcccca

SEQ ID NO: 1595 - RNA, 21 nt, synthetic construct
  source 1..21: mol_type = other RNA
tcaacactgcaggtgatgtcc

SEQ ID NO: 1596 - RNA, 21 nt, synthetic construct
  source 1..21: mol_type = other RNA
tatgtcgtcgaagttcccaca

SEQ ID NO: 1597 - RNA, 21 nt, synthetic construct
  source 1..21: mol_type = other RNA
tatcttgtcctcatcaaagac

SEQ ID NO: 1598 - RNA, 21 nt, synthetic construct
  source 1..21: mol_type = other RNA
ttcgtgtggtagatgacgtcc

SEQ ID NO: 1599 - RNA, 21 nt, synthetic construct
  source 1..21: mol_type = other RNA
atttctgccaagaggaggtgc

SEQ ID NO: 1600 - RNA, 21 nt, synthetic construct
  source 1..21: mol_type = other RNA
tgttgttgaagatgatctcgt

SEQ ID NO: 1601 - RNA, 21 nt, synthetic construct
  source 1..21: mol_type = other RNA
tgttgttgtaggtttccttgc

SEQ ID NO: 1602 - RNA, 21 nt, synthetic construct
  modified_base 4: mod_base = i
  source 1..21: mol_type = other RNA
ttgntgttgaagatgatctcg

SEQ ID NO: 1603 - RNA, 21 nt, synthetic construct
  source 1..21: mol_type = other RNA
atcttgtcctcatcaaagatg

SEQ ID NO: 1604 - RNA, 21 nt, synthetic construct
  source 1..21: mol_type = other RNA
tcatcttgtcctcatcaaagc

SEQ ID NO: 1605 - RNA, 21 nt, synthetic construct
  source 1..21: mol_type = other RNA
tctagttgtaggagcagagac

SEQ ID NO: 1606 - RNA, 21 nt, synthetic construct
  source 1..21: mol_type = other RNA
tagttgtagaagcagaggttg

SEQ ID NO: 1607 - RNA, 21 nt, synthetic construct
  source 1..21: mol_type = other RNA
tagaagttgtgctggttatag

SEQ ID NO: 1608 - RNA, 21 nt, synthetic construct
  source 1..21: mol_type = other RNA
ttcttgttcaggcaaatcagg

SEQ ID NO: 1609 - RNA, 21 nt, synthetic construct
  modified_base 13: mod_base = i
  source 1..21: mol_type = other RNA
acctgctccaagnccatcaaa

SEQ ID NO: 1610 - RNA, 21 nt, synthetic construct
  source 1..21: mol_type = other RNA
tgctccaaggccatcaagatt

SEQ ID NO: 1611 - RNA, 21 nt, synthetic construct
  source 1..21: mol_type = other RNA
aacctcagctccgagttcaaa

SEQ ID NO: 1612 - RNA, 21 nt, synthetic construct
  modified_base 16: mod_base = i
  source 1..21: mol_type = other RNA
cccagaagcagtgcancatca

SEQ ID NO: 1613 - RNA, 21 nt, synthetic construct
  modified_base 16: mod_base = i
  source 1..21: mol_type = other RNA
tgccctctgttctgcnactaa

SEQ ID NO: 1614 - RNA, 21 nt, synthetic construct
  modified_base 13: mod_base = i
  source 1..21: mol_type = other RNA
gccctctgttctncgactact

SEQ ID NO: 1615 - RNA, 21 nt, synthetic construct
  source 1..21: mol_type = other RNA
cctctgttctgcgactactaa

SEQ ID NO: 1616 - RNA, 21 nt, synthetic construct
  source 1..21: mol_type = other RNA
ctctgttctgcgactactaca

SEQ ID NO: 1617 - RNA, 21 nt, synthetic construct
  source 1..21: mol_type = other RNA
gctgttctgcgactactacaa

SEQ ID NO: 1618 - RNA, 21 nt, synthetic construct
  source 1..21: mol_type = other RNA
ccacccatctgctacaactat

SEQ ID NO: 1619 - RNA, 21 nt, synthetic construct
  modified_base 16: mod_base = i
  source 1..21: mol_type = other RNA
gcaaagtggttcgacntggaa

SEQ ID NO: 1620 - RNA, 21 nt, synthetic construct
  modified_base 16: mod_base = i
  source 1..21: mol_type = other RNA
gagtggttcgacgtgnactta

SEQ ID NO: 1621 - RNA, 21 nt, synthetic construct
  modified_base 14: mod_base = i
  source 1..21: mol_type = other RNA
gtggttcgacgtgnacttcca

SEQ ID NO: 1622 - RNA, 21 nt, synthetic construct
  source 1..21: mol_type = other RNA
gtggttcgacgtggacttcca

SEQ ID NO: 1623 - RNA, 21 nt, synthetic construct
  modified_base 16: mod_base = i
  source 1..21: mol_type = other RNA
cagcttccactacaanacctt

SEQ ID NO: 1624 - RNA, 21 nt, synthetic construct
  source 1..21: mol_type = other RNA
cagcttccactacaagacctt

SEQ ID NO: 1625 - RNA, 21 nt, synthetic construct
  modified_base 2: mod_base = OTHER; note = 2-aminoadenine-containing nucleotide
  modified_base 19: mod_base = i
  source 1..21: mol_type = other RNA
gnagtatgctcagcactgnta

SEQ ID NO: 1626 - RNA, 21 nt, synthetic construct
  modified_base 2: mod_base = OTHER; note = 2-aminoadenine-containing nucleotide
  modified_base 19: mod_base = i
  source 1..21: mol_type = other RNA
gnagtatgctcagtactgnta

SEQ ID NO: 1627 - RNA, 21 nt, synthetic construct
  source 1..21: mol_type = other RNA
gccttcttcaacaccttcaaa

SEQ ID NO: 1628 - RNA, 21 nt, synthetic construct
  source 1..21: mol_type = other RNA
gccttcttcaacatcttcaaa

SEQ ID NO: 1629 - RNA, 21 nt, synthetic construct
  source 1..21: mol_type = other RNA
gccttcttcaacactttcaaa

SEQ ID NO: 1630 - RNA, 21 nt, synthetic construct
  modified_base 16: mod_base = i
  source 1..21: mol_type = other RNA
gggacaagaagaccancatct

SEQ ID NO: 1631 - RNA, 21 nt, synthetic construct
  source 1..21: mol_type = other RNA
ggaccagcatcttcatcaaca

SEQ ID NO: 1632 - RNA, 21 nt, synthetic construct
  source 1..21: mol_type = other RNA
gctgatttgcctgaacaagaa

SEQ ID NO: 1633 - RNA, 21 nt, synthetic construct
  modified_base 2: mod_base = OTHER; note = 2-aminoadenine-containing nucleotide
  source 1..21: mol_type = other RNA
cnaggaaacctacaacaacat

SEQ ID NO: 1634 - RNA, 21 nt, synthetic construct
  source 1..21: mol_type = other RNA
ggaaacctacaacaacatcat

SEQ ID NO: 1635 - RNA, 21 nt, synthetic construct
  modified_base 2: mod_base = OTHER; note = 2-aminoadenine-containing nucleotide
  source 1..21: mol_type = other RNA
gnagaccagcatcttcatcaa

SEQ ID NO: 1636 - RNA, 21 nt, synthetic construct
  modified_base 17: mod_base = i
  source 1..21: mol_type = other RNA
gctgctacaactaccanatca

SEQ ID NO: 1637 - RNA, 21 nt, synthetic construct
  modified_base 19: mod_base = i
  source 1..21: mol_type = other RNA
gctacaactaccagatcanga

SEQ ID NO: 1638 - RNA, 21 nt, synthetic construct
  source 1..21: mol_type = other RNA
cccacccatctgctacaacta

SEQ ID NO: 1639 - RNA, 21 nt, synthetic construct
  modified_base 17: mod_base = i
  source 1..21: mol_type = other RNA
gagatccgcatccagtnttga

SEQ ID NO: 1640 - RNA, 21 nt, synthetic construct
  modified_base 16: mod_base = i
  source 1..21: mol_type = other RNA
ccagaggtgagcatcnaacaa

SEQ ID NO: 1641 - RNA, 21 nt, synthetic construct
  source 1..21: mol_type = other RNA
cagcagggacccttcaagata

SEQ ID NO: 1642 - RNA, 21 nt, synthetic construct
  modified_base 2: mod_base = OTHER; note = 2-aminoadenine-containing nucleotide
  modified_base 20: mod_base = i
  source 1..21: mol_type = other RNA
cnagatgtgcctcaactacna

SEQ ID NO: 1643 - RNA, 21 nt, synthetic construct
  modified_base 18: mod_base = i
  source 1..21: mol_type = other RNA
ggatgtgcctcaactacnaga

SEQ ID NO: 1644 - RNA, 21 nt, synthetic construct
  source 1..21: mol_type = other RNA
gacagcgagacctgcttgaaa

SEQ ID NO: 1645 - RNA, 21 nt, synthetic construct
  source 1..21: mol_type = other RNA
ccaacgtcaccatcttcagaa

SEQ ID NO: 1646 - RNA, 21 nt, synthetic construct
  modified_base 2: mod_base = OTHER; note = 2-aminoadenine-containing nucleotide
  modified_base 18: mod_base = i
  source 1..21: mol_type = other RNA
cnacgtcaccatcttcanaca

SEQ ID NO: 1647 - RNA, 21 nt, synthetic construct
  source 1..21: mol_type = other RNA
catccaggccgatgacttcca

SEQ ID NO: 1648 - RNA, 21 nt, synthetic construct
  modified_base 2: mod_base = OTHER; note = 2-aminoadenine-containing nucleotide
  modified_base 19: mod_base = i
  source 1..21: mol_type = other RNA
gnacctactactcgaactnca

SEQ ID NO: 1649 - RNA, 21 nt, synthetic construct
  source 1..21: mol_type = other RNA
acagggaccacctgcttcaaa

SEQ ID NO: 1650 - RNA, 21 nt, synthetic construct
  source 1..21: mol_type = other RNA
cctgctccaaggctatcaaga

SEQ ID NO: 1651 - RNA, 21 nt, synthetic construct
  modified_base 2: mod_base = OTHER; note = 2-aminoadenine-containing nucleotide
  modified_base 17: mod_base = i
  source 1..21: mol_type = other RNA
cntgtggaaccacgatnacaa

SEQ ID NO: 1652 - RNA, 21 nt, synthetic construct
  modified_base 20: mod_base = i
  source 1..21: mol_type = other RNA
aggcaagacctctgcttctnt

SEQ ID NO: 1653 - RNA, 21 nt, synthetic construct
  modified_base 20: mod_base = i
  source 1..21: mol_type = other RNA
tccacagactgcaccaactna

SEQ ID NO: 1654 - RNA, 21 nt, synthetic construct
  modified_base 20: mod_base = i
  source 1..21: mol_type = other RNA
gcagtgccttcactgtactna

SEQ ID NO: 1655 - RNA, 21 nt, synthetic construct
  modified_base 19: mod_base = i
  source 1..21: mol_type = other RNA
gctgtgggaacttcaacanca

SEQ ID NO: 1656 - RNA, 21 nt, synthetic construct
  modified_base 16: mod_base = i
  source 1..21: mol_type = other RNA
gtgggaacttcaacancatca

SEQ ID NO: 1657 - RNA, 21 nt, synthetic construct
  modified_base 17: mod_base = i
  source 1..21: mol_type = other RNA
gcttcaacaccttcaanacca

SEQ ID NO: 1658 - RNA, 21 nt, synthetic construct
  modified_base 18: mod_base = i
  source 1..21: mol_type = other RNA
ccccaacatcaggaacanctt

SEQ ID NO: 1659 - RNA, 21 nt, synthetic construct
  modified_base 16: mod_base = i
  source 1..21: mol_type = other RNA
cctactactcgaactncatgt

SEQ ID NO: 1660 - RNA, 21 nt, synthetic construct
  modified_base 17: mod_base = i
  source 1..21: mol_type = other RNA
gtcacctgcagtgttgnctta

SEQ ID NO: 1661 - RNA, 21 nt, synthetic construct
  source 1..21: mol_type = other RNA
gctggacatgacctgttacaa

SEQ ID NO: 1662 - RNA, 21 nt, synthetic construct
  modified_base 20: mod_base = i
  source 1..21: mol_type = other RNA
gcagagctacagcttcaacna

SEQ ID NO: 1663 - RNA, 21 nt, synthetic construct
  source 1..21: mol_type = other RNA
ctgctacaactatgagatcca

SEQ ID NO: 1664 - RNA, 21 nt, synthetic construct
  modified_base 16: mod_base = i
  source 1..21: mol_type = other RNA
ctgctacaactatganatcca

SEQ ID NO: 1665 - RNA, 21 nt, synthetic construct
  source 1..21: mol_type = other RNA
cctggaccaagtggtttgaca

SEQ ID NO: 1666 - RNA, 21 nt, synthetic construct
  modified_base 18: mod_base = i
  source 1..21: mol_type = other RNA
cctggaccaagtggtttnaca

SEQ ID NO: 1667 - RNA, 21 nt, synthetic construct
  source 1..21: mol_type = other RNA
cgagatcatcttcaacaacaa

SEQ ID NO: 1668 - RNA, 21 nt, synthetic construct
  source 1..21: mol_type = other RNA
agcagtgccttcactgtacta

SEQ ID NO: 1669 - RNA, 21 nt, synthetic construct
  modified_base 19: mod_base = i
  source 1..21: mol_type = other RNA
gacatcaggaacagcttcnaa

SEQ ID NO: 1670 - RNA, 21 nt, synthetic construct
  source 1..21: mol_type = other RNA
ggctgatttgcctgaacaaga

SEQ ID NO: 1671 - RNA, 21 nt, synthetic construct
  modified_base 17: mod_base = i
  source 1..21: mol_type = other RNA
ccaggacaaccactttngtga

SEQ ID NO: 1672 - RNA, 21 nt, synthetic construct
  modified_base 18: mod_base = i
  source 1..21: mol_type = other RNA
caaccagaacaacctctncta

SEQ ID NO: 1673 - RNA, 21 nt, synthetic construct
  source 1..21: mol_type = other RNA
cgctacaaccagcacaatcta

SEQ ID NO: 1674 - RNA, 21 nt, synthetic construct
  source 1..21: mol_type = other RNA
ccacaaccagcacaacttcta

SEQ ID NO: 1675 - RNA, 21 nt, synthetic construct
  source 1..21: mol_type = other RNA
gacaaccactttggtgacaaa

SEQ ID NO: 1676 - RNA, 21 nt, synthetic construct
  source 1..21: mol_type = other RNA
ctacaaccaacacaacttcta

SEQ ID NO: 1677 - RNA, 21 nt, synthetic construct
  source 1..21: mol_type = other RNA
acctctgctcctacaactaga

SEQ ID NO: 1678 - RNA, 21 nt, synthetic construct
  source 1..21: mol_type = other RNA
gctgttctgtgactactacaa

SEQ ID NO: 1679 - RNA, 21 nt, synthetic construct
  source 1..21: mol_type = other RNA
accagatcatcttcaacaaca

SEQ ID NO: 1680 - RNA, 21 nt, synthetic construct
  source 1..21: mol_type = other RNA
ggctctgtggtaacttcaaca

SEQ ID NO: 1681 - RNA, 21 nt, synthetic construct
  source 1..21: mol_type = other RNA
gagcgtggagaatgaaaagta

SEQ ID NO: 1682 - RNA, 21 nt, synthetic construct
  source 1..21: mol_type = other RNA
gggagaatgaaaagtatgcta

SEQ ID NO: 1683 - RNA, 21 nt, synthetic construct
  source 1..21: mol_type = other RNA
cttctcgaactgcatgtatga

SEQ ID NO: 1684 - RNA, 21 nt, synthetic construct
  source 1..21: mol_type = other RNA
gctcgaactgcatgtatgaca

SEQ ID NO: 1685 - RNA, 21 nt, synthetic construct
  source 1..21: mol_type = other RNA
ctcgaactgcatgtatgacaa

SEQ ID NO: 1686 - RNA, 21 nt, synthetic construct
  source 1..21: mol_type = other RNA
ccactgttctgtgactactaa

SEQ ID NO: 1687 - RNA, 21 nt, synthetic construct
  source 1..21: mol_type = other RNA
cactgttctgtgactactaca

SEQ ID NO: 1688 - RNA, 21 nt, synthetic construct
  modified_base 16: mod_base = i
  source 1..21: mol_type = other RNA
ccttcttctcgaactncatgt

SEQ ID NO: 1689 - RNA, 21 nt, synthetic construct
  source 1..21: mol_type = other RNA
ccacccatgtgctacaactat

SEQ ID NO: 1690 - RNA, 21 nt, synthetic construct
  source 1..21: mol_type = other RNA
gactgttctgtgactactaca

SEQ ID NO: 1691 - RNA, 21 nt, synthetic construct
  modified_base 16: mod_base = i
  source 1..21: mol_type = other RNA
tggggaagtgttcctnaacca

SEQ ID NO: 1692 - RNA, 21 nt, synthetic construct
  modified_base 17: mod_base = i
  source 1..21: mol_type = other RNA
ggacatcacctgcagtnttga

SEQ ID NO: 1693 - RNA, 21 nt, synthetic construct
  modified_base 16: mod_base = i
  source 1..21: mol_type = other RNA
tgtgggaacttcgacnacata

SEQ ID NO: 1694 - RNA, 21 nt, synthetic construct
  source 1..21: mol_type = other RNA
gtctttgatgaggacaagata

SEQ ID NO: 1695 - RNA, 21 nt, synthetic construct
  modified_base 19: mod_base = i
  source 1..21: mol_type = other RNA
ggacgtcatctaccacacnaa

SEQ ID NO: 1696 - RNA, 21 nt, synthetic construct
  modified_base 14: mod_base = i
  source 1..21: mol_type = other RNA
gcacctcctcttgncagaaat

SEQ ID NO: 1697 - RNA, 21 nt, synthetic construct
  source 1..21: mol_type = other RNA
acgagatcatcttcaacaaca

SEQ ID NO: 1698 - RNA, 21 nt, synthetic construct
  source 1..21: mol_type = other RNA
gcaaggaaacctacaacaaca

SEQ ID NO: 1699 - RNA, 21 nt, synthetic construct
  modified_base 14: mod_base = OTHER; note = 2-aminoadenine-containing nucleotide
  source 1..21: mol_type = other RNA
gctgatttgcctgnacaagaa

SEQ ID NO: 1700 - RNA, 21 nt, synthetic construct
  modified_base 14: mod_base = OTHER; note = 2-aminoadenine-containing nucleotide
  source 1..21: mol_type = other RNA
cgagatcatcttcnacaacaa

SEQ ID NO: 1701 - RNA, 21 nt, synthetic construct
  source 1..21: mol_type = other RNA
catctttgatgaggacaagat

SEQ ID NO: 1702 - RNA, 21 nt, synthetic construct
  source 1..21: mol_type = other RNA
gctttgatgaggacaagatga

SEQ ID NO: 1703 - RNA, 21 nt, synthetic construct
  source 1..21: mol_type = other RNA
gtctctgctcctacaactaga

SEQ ID NO: 1704 - RNA, 21 nt, synthetic construct
  source 1..21: mol_type = other RNA
caacctctgcttctacaacta

SEQ ID NO: 1705 - RNA, 21 nt, synthetic construct
  modified_base 3: mod_base = OTHER; note = 2-aminoadenine-containing nucleotide
  source 1..21: mol_type = other RNA
ctntaaccagcacaacttcta

SEQ ID NO: 1706 - RNA, 21 nt, synthetic construct
  source 1..21: mol_type = other RNA
ctataaccagcacaacttcta

SEQ ID NO: 1707 - RNA, 21 nt, synthetic construct
  source 1..21: mol_type = other RNA
gctgttttgcgactactacaa

SEQ ID NO: 1708 - RNA, 21 nt, synthetic construct
  source 1..21: mol_type = other RNA
gctgttctgcgattactacaa

SEQ ID NO: 1709 - RNA, 21 nt, synthetic construct
  source 1..21: mol_type = other RNA
gctgttctgcgactattacaa

SEQ ID NO: 1710 - RNA, 21 nt, synthetic construct
  source 1..21: mol_type = other RNA
cctgatttgcctgaacaagaa

SEQ ID NO: 1711 - RNA, 22 nt, synthetic construct
  source 1..22: mol_type = other RNA
gctggttctgcgactactacaa

SEQ ID NO: 1712 - RNA, 20 nt, synthetic construct
  source 1..20: mol_type = other RNA
gcgttctgcgactactacaa

SEQ ID NO: 1713 - RNA, 21 nt, synthetic construct
  modified_base 1: mod_base = OTHER; note = 5'-cyclopropyl phosphonate-2'-O-methyluridine
  modified_base 1^2: mod_base = OTHER; note = phosphorothioate linkage
  modified_base 2: mod_base = OTHER; note = 2'-fluoroguanosine
  modified_base 2^3: mod_base = OTHER; note = phosphorothioate linkage
  modified_base 3: mod_base = um
  modified_base 3^4: mod_base = OTHER; note = phosphorothioate linkage
  modified_base 4: mod_base = OTHER; note = 2'-fluoroadenosine
  modified_base 5: mod_base = OTHER; note = 2'-O-methyladenosine
  modified_base 6: mod_base = OTHER; note = 2'-fluorocytidine
  modified_base 7: mod_base = um
  modified_base 8: mod_base = OTHER; note = 2'-fluoroguanosine
  modified_base 9: mod_base = um
  modified_base 10: mod_base = OTHER; note = 2'-fluoroadenosine
  modified_base 11: mod_base = cm
  modified_base 12: mod_base = OTHER; note = 2'-fluorouridine
  modified_base 13: mod_base = gm
  modified_base 14: mod_base = OTHER; note = 2'-fluorocytidine
  modified_base 15: mod_base = um
  modified_base 16: mod_base = OTHER; note = 2'-fluoroguanosine
  modified_base 17: mod_base = um
  modified_base 18: mod_base = OTHER; note = 2'-fluoroadenosine
  modified_base 19: mod_base = um
  modified_base 20: mod_base = OTHER; note = 2'-fluoroguanosine
  modified_base 20^21: mod_base = OTHER; note = phosphorothioate linkage
  modified_base 21: mod_base = gm
  source 1..21: mol_type = other RNA
tgtaactgtactgctgtatgg

SEQ ID NO: 1714 - RNA, 21 nt, synthetic construct
  modified_base 1: mod_base = cm
  modified_base 1^2: mod_base = OTHER; note = phosphorothioate linkage
  modified_base 2: mod_base = cm
  modified_base 3: mod_base = OTHER; note = 2'-O-methyladenosine
  modified_base 4: mod_base = um
  modified_base 5: mod_base = OTHER; note = 2'-O-methyladenosine
  modified_base 6: mod_base = cm
  modified_base 7: mod_base = OTHER; note = 2'-O-methyladenosine
  modified_base 8: mod_base = gm
  modified_base 9: mod_base = OTHER; note = 2'-fluorocytidine
  modified_base 10: mod_base = OTHER; note = 2'-fluoroadenosine
  modified_base 11: mod_base = OTHER; note = 2'-fluoroguanosine
  modified_base 12: mod_base = um
  modified_base 13: mod_base = OTHER; note = 2'-O-methyladenosine
  modified_base 14: mod_base = cm
  modified_base 15: mod_base = OTHER; note = 2'-O-methyladenosine
  modified_base 16: mod_base = gm
  modified_base 17: mod_base = um
  modified_base 18: mod_base = um
  modified_base 19: mod_base = OTHER; note = 2'-O-methyladenosine
  modified_base 20: mod_base = cm
  modified_base 21: mod_base = OTHER; note = 2'-O-methyladenosine
  source 1..21: mol_type = other RNA
ccatacagcagtacagttaca

SEQ ID NO: 1715 - RNA, 21 nt, synthetic construct
  modified_base 1: mod_base = um
  modified_base 1^2: mod_base = OTHER; note = phosphorothioate linkage
  modified_base 2: mod_base = OTHER; note = 2'-fluoroguanosine
  modified_base 2^3: mod_base = OTHER; note = phosphorothioate linkage
  modified_base 3: mod_base = um
  modified_base 3^4: mod_base = OTHER; note = phosphorothioate linkage
  modified_base 4: mod_base = OTHER; note = 2'-fluorouridine
  modified_base 5: mod_base = gm
  modified_base 6: mod_base = OTHER; note = 2'-fluorouridine
  modified_base 7: mod_base = um
  modified_base 8: mod_base = OTHER; note = 2'-fluoroguanosine
  modified_base 9: mod_base = OTHER; note = 2'-O-methyladenosine
  modified_base 10: mod_base = OTHER; note = 2'-fluoroadenosine
  modified_base 11: mod_base = gm
  modified_base 12: mod_base = OTHER; note = 2'-fluoroadenosine
  modified_base 13: mod_base = um
  modified_base 14: mod_base = OTHER; note = 2'-fluoroguanosine
  modified_base 15: mod_base = OTHER; note = 2'-O-methyladenosine
  modified_base 16: mod_base = OTHER; note = 2'-fluorouridine
  modified_base 17: mod_base = cm
  modified_base 18: mod_base = OTHER; note = 2'-fluorouridine
  modified_base 19: mod_base = gm
  modified_base 20: mod_base = OTHER; note = 2'-fluoroguanosine
  modified_base 20^21: mod_base = OTHER; note = phosphorothioate linkage
  modified_base 21: mod_base = um
  source 1..21: mol_type = other RNA
tgttgttgaagatgatctggt

SEQ ID NO: 1716 - RNA, 21 nt, synthetic construct
  modified_base 1: mod_base = um
  modified_base 1^2: mod_base = OTHER; note = phosphorothioate linkage
  modified_base 2: mod_base = OTHER; note = 2'-fluoroguanosine
  modified_base 2^3: mod_base = OTHER; note = phosphorothioate linkage
  modified_base 3: mod_base = gm
  modified_base 3^4: mod_base = OTHER; note = phosphorothioate linkage
  modified_base 4: mod_base = OTHER; note = 2'-fluoroadenosine
  modified_base 5: mod_base = um
  modified_base 6: mod_base = OTHER; note = 2'-fluorocytidine
  modified_base 7: mod_base = um
  modified_base 8: mod_base = OTHER; note = 2'-fluorocytidine
  modified_base 9: mod_base = OTHER; note = 2'-O-methyladenosine
  modified_base 10: mod_base = OTHER; note = 2'-fluorouridine
  modified_base 11: mod_base = OTHER; note = 2'-O-methyladenosine
  modified_base 12: mod_base = OTHER; note = 2'-fluoroguanosine
  modified_base 13: mod_base = um
  modified_base 14: mod_base = OTHER; note = 2'-fluorouridine
  modified_base 15: mod_base = gm
  modified_base 16: mod_base = OTHER; note = 2'-fluorouridine
  modified_base 17: mod_base = OTHER; note = 2'-O-methyladenosine
  modified_base 18: mod_base = OTHER; note = 2'-fluoroguanosine
  modified_base 19: mod_base = cm
  modified_base 20: mod_base = OTHER; note = 2'-fluoroadenosine
  modified_base 20^21: mod_base = OTHER; note = phosphorothioate linkage
  modified_base 21: mod_base = gm
  source 1..21: mol_type = other RNA
tggatctcatagttgtagcag

SEQ ID NO: 1717 - RNA, 21 nt, synthetic construct
  modified_base 1: mod_base = um
  modified_base 1^2: mod_base = OTHER; note = phosphorothioate linkage
  modified_base 2: mod_base = OTHER; note = 2'-fluorouridine
  modified_base 2^3: mod_base = OTHER; note = phosphorothioate linkage
  modified_base 3: mod_base = gm
  modified_base 3^4: mod_base = OTHER; note = phosphorothioate linkage
  modified_base 4: mod_base = OTHER; note = 2'-fluorouridine
  modified_base 5: mod_base = um
  modified_base 6: mod_base = OTHER; note = 2'-fluoroguanosine
  modified_base 7: mod_base = um
  modified_base 8: mod_base = OTHER; note = 2'-fluorouridine
  modified_base 9: mod_base = gm
  modified_base 10: mod_base = OTHER; note = 2'-fluoroadenosine
  modified_base 11: mod_base = OTHER; note = 2'-O-methyladenosine
  modified_base 12: mod_base = OTHER; note = 2'-fluoroguanosine
  modified_base 13: mod_base = OTHER; note = 2'-O-methyladenosine
  modified_base 14: mod_base = OTHER; note = 2'-fluorouridine
  modified_base 15: mod_base = gm
  modified_base 16: mod_base = OTHER; note = 2'-fluoroadenosine
  modified_base 17: mod_base = um
  modified_base 18: mod_base = OTHER; note = 2'-fluorocytidine
  modified_base 19: mod_base = um
  modified_base 20: mod_base = OTHER; note = 2'-fluorocytidine
  modified_base 20^21: mod_base = OTHER; note = phosphorothioate linkage
  modified_base 21: mod_base = gm
  source 1..21: mol_type = other RNA
ttgttgttgaagatgatctcg

SEQ ID NO: 1718 - RNA, 21 nt, synthetic construct
  source 1..21: mol_type = other RNA
ttgttgttgaagatgatctcg
